United States Patent Application Publication US 2026/0275333 A1 - sequence listing, part 26

SEQ ID NO: 3045 - RNA, 64444167 nt, Homo sapiens (residues 53,703,476-55,851,614 of 64,444,167)
  source 1..64444167: mol_type = mRNA
atatcagaagtttactttttaaattttttattatttatttatttatttattgagacggagtcttttgcttttgtcacccaggctggagtgcaatggcacaatcttggctcactgcaacctccacctcccaggttcaagccattctcctgcctcagcctcccaagtagctgggattataggcgggtgccaccaggcccagctaattttttttgtatttttagtagagatggggtttcaccatgttggtcaggccggtgttgaactcctgacctctagtgatccacctgcctcggcctcccaaagtgctgggattacaggcgtgagctggcctatttatttttttgagatggagtcttgctctgtcgcccaggctggagtgcagtggcacaatctcggctcactgcaacttccgcctcccgggttcaagcaattctccggcctcagcatcctgagtagctggtacgacaggtgcgtgccaccacatccagctaatttttgtatttttagtagagacgggggtctaccatgttggccaggctggtctccaactcctgacttcaagtgacccgcccgcgttggcctcccaaaatgatgggattacagctgtaagctatagcgcccggggtgttttttatttcattttatttgttttattttattttttgtagagatgaagtcttgttatgttgctgaggctgatcttaaacttctggtctcatgtgatcctcctgcctcagcctcccaaagtgctgggattacaggcataagcccctgcatccagcctgttcatttcttttctttcttattttattttattattatttttttttgagacggagtctcgctctgtcgcccaggctggagtgcagtggcccaatcttggctcactgcaagctccgcctcccgggttcacgccattctcctgcctcagcctctggagtagctgggactacaggcgcccgccaccgcacccggctaatttttgtatttttagtagagacagggtttcaccgtgttggccaggatggtctcgatctcctgagcttgtgatccgcctgcctctgcctcccaaagtgctgggattacaggtgtgagccaccccgcctggcctgttcatttcttttaaaaactggatatggccaggcgcggtggctcatgcctgtaatcccagcactttgggaggccgaggaggacagatcacgaggtcaggagacggagaccatcctggccaacatggtgaaaccccgtctctactaaaaatacaaaaatcagccgggcgtggtggcgtgtgcctgtaatcccagctactcgggaggctgaggcaggagaatggcttgaaccagggagtcggaggatgcagtgagccgagattgccctgctgtactccagcctggcaacagagcgagactccgtgtcaaacaaaaacaaaaacaaaacaaaaactggatactattccactgcatggacgtacaacatcttgtttatccgttcatcccttgatggaatttgggttgcttccatattttaggtattgcgtgtagtgttgctatgaacatggctgcacaaatatctgtttgctttcctgttttcaatttttttttttttttttacctaggagtgggattgttggatcatatgataatgctatgcttaactttttgaggcactgccagaattccaaaaaggagaagaaggaagcaaataaaaagaaaccataacaaacctcacattctggcttagaatagatatgtgcaccaattatatttttcccctctcctaccaagccttccatctgtaattctgctagttaatattcagagagagagacttaggaaaatatagtttggagttttctttgaaggcaagtcttccctttagaagtcctgataaaataaaatttctctataactttttgtatttttattttatttaattaatttatttatttttgagacggagtttcactcttgttgcccaggctggtgtgcagtggtgcaatctcagctcaccgcaacctccgcctcccaggttcaagcatttctcctgcctcagcctccggagtaactgggattacaggcatgcgccaccatacttggctaattttttgtatttttagtagagacagggtttctccatgttggtcaggctggtctcgaactcccgaccacaggtgattcacccgcctcggcctcccaaagtgctggaattacaggcgtgagccactgcgcccggcctttgattttcttcttattattattttgagacaaagtctcgctctgttgcccaggttggagtgtagtgtcatgatcccagctcactgcaacctcctccttctgggttcaagcgattctcctgcctcagccacccgagtagctgggattacaggcgcccgccaccacacccagctaatttttgtatttttagtagagacagggtttcaccatgttggccaggctggtcttgaactcctgacctcaagtgatccacccaccttggcctcccaaagtgcttggattataagcgtgagccaccatgcctggccaaactttcgtatttttaaatcatgcttgacactgaagccaaaataagttccttttctgggtgtatttttattgtaatgtccaaggatacacatgaataactgcacataattgtaggctagaccaatattaggcaagctgcattcatacatctctttcctcaaggctgtgtttgcttgaattttcaaattcttggtcacaatgagtaagtcaattttcctcatgcgacttcaccttacaagcaggtaagttcttaactatatgcaacatttgatttcaccacatgtatgacttttctaagattgtaactcaggcaccaaggcatcatcaattgaggataaaattcttttggaaactcaaaatatttcaggaatcttaaatattctacttacagatgggataaaatgtgttctctgtccatggaaccagaacatgtggtgagcacaattccctgaaaaataaaaataaaaaacccaccctgtctctacattctgtgcattttgctgtctgtatgttcttgaattgaaagatcctctctaccagttctgagaagcaatttgttattttcctctaaacccctcggttgtggcgagactttcctcccagctgaatcggtctgctgcaagaatgtacttgcgtgatacttaatcccttagtgggagcccagatagagtttcttgccagaactagagattgccccttttacaaattcccctttctaagcaagctatgataacccacatttggggcctgcaacatcctttcagtgcatttttaaacaagagaaaagggctccatcttgtatcataaattacagtaacatcctttctaaccacagaggtgcagttcacatgagcagaaacagtctatttcaggatctcatgggtaagctgtatacccatgaacaactgtataaagtaactgtttataactcctagaccagtggcactctggttaactggttctagtgggtggaggcagaggagtcttggttgtgtttgtcagtttccacggtgtaaatattcccaccatgtctaattttagactgcagtctgtgaggatagagttgaaaagacatgtgcaaaatcagctttccagagccagtacaaagagttctgatgcaccacattctcaaaccttcctttgacttgagacccagaaccgaaatctcttgaaacagcagcatcctattctttcttggacaaagttaacaaaaatgaggttttgttacaaccatgatatcttgtctccatcacaaaaccccagaggccttgctaattctttccaagtaacagaatttacctaaattgtgccaaagttaatattaaacctcaatcactgttctgacccagggcataaacatcctgagaaatcaaatgcttttttgtattaaatacatgtgtacgcacacacacaagctcacacacacatgcgcacacatacacacacaaacacaagcacacacatatatacaagcacacacacacacaaacacatacacacaagcacacacatatatacaagcgcacacatacacatgcacacaggctcaaacacacacatgcacatacacgtacacatgcattcacacatttacatacacatatacacaggcacacaatacacacctgcacacatacacacacatatacacacacaaagcatctcattagtgactccctgctgtgaaaggaattttatttaaaaataattgtcacatgtactttaggacttgtaattattttaacaaaatgttcttgtcatgttgatgacattctaatgacatgttattggtatttttgttctccaaatgcgaatgtttcccaggaaactgaccagtgggaaggaaggtgggtggggaagtgaaagtgtgtcagaaactgcaagttagagttctgcttaactcagtttaagttctagggtgactaacattttctagggaggaagagcgttctggtttcttaggagtaactgcaaaccccttctctgggatcctctgagcttcctctgcatcctgagcaaatgcttgtgacacagagttggtgcttttgatttctttatctgattatcctattagatcaggctcttcatcaagtagctggcttctttatctctttaacactctccagtgtccagaaaagtacctgaatttgtgtgtggaacaagtgacatgacttattttcaaaatgaaaatgataccattgagatttcaagattcaaatgagctcatattttttatgaattcatcctatgcaattcagccccttttaaggtctctaccgtggcagccaactctgttgaaagtagcatgggagagagtggtttttgcagatggctcaagcaaatgacaagggggtgatgtgtgggttaaaggcagcaggttaatagtgtgggcagagagaggaatgtggaacggaatcacagctttgttgtggcactgaatcgctgtgagcattggtttgctcagctgtaaactaggctcacatctaaagcctaaagacgttgtaaagattaaatgagataatacgcatggaaggcttaacaggctgactggtccagggtcattttcactcaacaaatgtagttcctgtccctgccttcctccctccaccaactacctcttttttttcagttaagtgtgtttttaaaaattgtggtaaaatatacgagacaaaaatctaccagtctgaccatcctcccctcccctcccctcccctcccctcccctgtcttcttttctttcttttttttaacagggtttcactttgttgcccaggctaaagtgcagtggcatagtgacagctcactgcagctttgacctccccaggctcaagccatcctcccatcctagcctccagagtagctggcactacaggcatgtaccaccatgcccagctaatttttctattttttttttttttttgtagagatggggtcttgctatgttgctcaggctgatctctcaaactcctgggctcaagcaatcctcccacctcagcctcccaaaatgttgggattacaggcatgagctaccatgcatggcctcattgtaaccatttttcaaggcatggttcagtgacagtaagtacattcacctcattgtgcacccaccaccaccatccatctccagaactttttcattattccaaactgaaatgccatccctgttaaacactaactccccggccaggcatggtggctcaggcctgtaatcccagcactttgggaggccgaggtggatggatcacaaggtcaggagtttgagaccagcctggccaatgtggtgaaaccccgtctctacaaaaaatacacaaattagccaggcgtggtggcgtgcacctatagtcccagctacttgggaggctgaggcaggagaattgcttggacccagtaggcggaggttgcagtgagctgagatcgcgccactgcactccagcctggctgacagagcaagactctgtctcaagaaaaacaaaacaaaacaaaaaaaacacactaactcccatccgcccctttcccacctcctggcaacctccactctactttccgtctctatacatttcactattctaggtatctcatataagtggaaccatacaatattcatatttgtccttttgtgtctcgcctcatgcacttagcataatgtcctcaaaattcatccatgttgaggcatatatcagtattcccctttttttttttttttttgagaccggctctcactctgttgcccaggctggagtgcagtgacacaatcacagatcactgcagcctcgacctcccgagctcagggctcaggcaatcctcccacctcagcctcccaagtagctgggaccacagatgcacactgctacatctggctaatatttcctattatttttgtagaaggggatctccctgtgttgcccaggctggtcttgaactcctgagcgcgagtgatccttcttggcctcccaaagtgatgggattataggcgtgccaccacacccagcccagaattctattttttaaggtggaataatattccattgcatgtatatattacattgtgttaatctgttcatctgatgatgtacatttgagttatttccacattttcactattgtgaataatgctgtggtgagtcctggtgtaccaatatctgtttgagccacctcctttttcaaaagtgtgtttgacagtcttggactccattctttttttttttttgagatggagtctcgccctgtcgcccaggctggagtgcagtggcgtgatctcggctcactgcaacctctgcctcccgggttcatgccattctcctgcctcaatctcctgagtagctgggactacaggcgcctgccaccacgcccggctaactttttatatttttagcagagatggggtttcaccgtgttagccaggatggtctcgatctcctgaccttgtgatccgcctgcctcggcctcccaaagtgctgggattacaggcgcgagccactgcacccggccttggactccattcttacctaagacattgatggtatgtgttccagaacagcctccaatctccctccttaggattccttgagtccaggagttcgagaccaacctgaccaacatagcgagaccctgtttctacaaaaaataaaaaattagccaggccaggcacggtggctcacgcctgtaatcccagcactttgggaggccgaggtgggtggatcacccaaggtcaggagttcgagatcagcctggccaacatggtgaaaccccatctctactaaaaatacaaaaattagccaggtgtggtggcatgcgcctgtaatctcagatactcagcaggctgaggcaggagaattgctcgaaccctggaggtggaggctgcagtgagccgagattgtgccactgcactccagcctgtatgacagagtgcgacttcttctcaaaaaaacaaaaataaataaaatacataaaatgagccgggcatggtgatgcatgcatatagtcccagctactcgggaggactgaggtgagaggaggattgcttgagctcaggaggtcgaggctgcagtgagctatgattatgccactataatccagcctgggtgacagaatgaaatcctgtctccaaaaaaaaaaagaaaagaaaaatccagaaaaccccaacccacccttttccaagagggcttccctgtttcccttacctaaaatggcccccctctgttattctctagcccttgattcagcttcagttttctcatgagaattaccagcatcttatggtaacggattgcaacggggtagaccccatctaaataacagaaaatattagcctggtgtagcagtgtgtgcctgtggtcccagctacttgggaggctgaggtgggaggactacctgagccctgagcccaggaggtcgaggctgcagtgacctctgattgtgtcactacattccagcctgggcaacagagcaaattataaatattgatttgtttattaactgtctccatggactactctgtcagatcaaggaggaagggcaggaacttagctgtagctgtattccagtgactaaaacagtgcctggtatacagtaggtgctcaacaaaaacatatttaatgactgtgcagcatctggttgccttacctctgcttgtctgctacccactcaacctgaaccactgctggggacacacacagcctagtgcagaaacatgtctctaggtctgggaaggaactcataagcagccctttaccagagtctgctgacaaacaccagtgtgagggcgtctgcagccagtgtggcgagccacatcctcgagttgtttgggattctggaacaatccaggtggtgaatgctgattctggccttgcccttcccggggcttggtctgacacatgaccctgatccctaaggttcagggtgagctctggctcacacgtgccaacagaggtgagtaaggctcggagaggacagtgcatgacacacgacaaccatgttttaaaacaaaccagtttcactcacttgctcctcattgttttatgtaaaaacattgcctcatggcgtccactggttccacagcccgcctgcttcattcctgatacatgcgtttgaagaacttgaagttttcctccctccttcccttccttccttcttccctccctacttccctccctccttccttccctcccttccttccttccttccctccctccctctctccctgttttcaggagcatcacaatgaccctcaactgagtgttatgtccaaacaggctgcagctggccaagctgcctccttcaggcatttagcaaaacagaaagccccgggagcaggctggaaatggaaagcgggccccagggtactttacttaacccttcaggcactttgaggttaaaagcgccaacatgaatgcccttcgccaactcaaaattgtatcatttggcagcattcccactagttcgtgcaggtaagaaatgaatggtctgcttgcttggcagcgagctgcgtgaacttgggcaggtcacttaactcctgtgagccctggtgtcttcatttttaaaacaaagcagctgaatcactaacaaccacaacaaactgacaaagtatcttgagcgtggatgtaacatccatcagcttgaattccactgaactcactctggaaaggggttttgcgggagaactcaggtgtcctgtggtgtctcagttttcctctgatgtcctcagattggtgattgcaaaatccaccagagttgctggaaaccaggcgtctgtgacgcggaggtgaggaaagaagagggcaggttaccgtaaagcagtggccgattccaaggctggtcaacatgctgaaaccccgtctctactaaaatacaaaaattagccaggcgtggaggcctggtttggcagtgtctggagacatgttggttttcccaatgtggggaggatcaccatgggtcatctagcgggtgaaggtgctgagatgctgcacaatagacaacgcacaaagcaatccccacaaagaattacccagctccaaatgtgcacgtgcttgagagactctgcctttctgggggctggggtgagccaggctgcgaatgctccctttctctcactagccggcacccacgatgggactttagcttagggaccagatcctgggccaggattttgatttttattttatttatttatttatttttgagatggagtttcgctcttgttgctcaggctggagtgcaatggcgcagtctcggctcgctgcaacctccgcctcaggggttcaagcaattctcctgcctcagcctccggagtagccaccaccatgcctggggcaggattctgcaccaattcttccccaaacccaggtcccctccttcctgcagccccttcccctcccagggagcctgcctgtcaaccccagtgagtccctcgggtctagttgtgtttgctggacttcattcatgcactcaacaaacactgagcacccctctgcacctgatcctgccatcggcagcaggggacaatgatgaccatgacaggggaccattgcccttgcttgctataaccttccccaaatgggataaagaggaatcccccgcaccaggtggaccagggctgtgggtggacaagggctcctgcgcagaaccatcaaattcttcctttcaaccccagcccaaggtgggtcctggtgcttcccatagtaccaagtgtgcctggcagaggtggagaaaactcccaggggtcggggagacactgggacccctgaaacgcccctcccctctgccttgtgcggagtggtccccagtcacctggcttgtactaaagacccagcacctccaactactgtggaatgcgacaggtcaggtgagaatgacgaaagctgagcagcggagctgggggaggggattgcaccacagacccctcaactcccacacccgccctcggcctttcttccgcacaagctcctcttgtccgctgtgctcttctcctcgccctccttctcttcttccacaggtgtcccagaggcgctggctccacttccctccttcacgtttttccctcttaactctcttccctggtctctatctccagagatctgaatttccttattttctttcttttttttttctgggacagtctctgtcgcccagattggagtgtagtggcgcaatctgcaaccatcgcctccccggttcaagcgattctcctgcctcagcctcctgagtagcacggattacgggcacgcgtctccacacccagctaatttttgtattttagtagagacggggtttcaccatgttggcccggctggtcttgaacttctgacttgaggtgatccacccgcctcggcctcccaaagtccgaggcgggtggatcacctgagccacatcgcctggcctctgaatttctttcttgccttaggcagagcagcttagaggccagtttctctaggggtcgcctgaagccatctttgcttcccactctgcagacctcccagctgcccaggctgcctgttcttccttcaaaatctatttcctattggtttcctcctcccattaccctgatcccacctggtgctggcaaaaacttccttggccaacttccagcaccagcctaaggatgccatggtcctcttcctggaagcccagccattcattctgcagcagtgcattctaagggtgctggctctggaggcagacgaactaaacagcgtcccgactgcaccgttgcctagctgtgtgacctgggacaagtgacttaacttcactgtgcctcagtttcttcatctgtaaaatgggtaccatgatcatccctgcctcttagggttgttttgaaggttaaacaaatgagtgaatatataaaatgctcagaacagtgtctggcacataagaagtgcttgataatgttgacaattccttttattattatttttgtaatcttcaagattaagagtctacttcttgttggtcgggtgtgctggctcatgctcataatcccagcactttgggaggccgaggcgggaggatcacttgaggccaggagtttgagaccagcctggccaacatggggaaaccccgtctctactaaaaatacaaaaattagcgggggcgtggtggcgtgcacctgcaatcccagctactcaggaggctgaggcagagaatcacttgaacccaggaggcagaggttgcagtgagccgagatcatgccactgtactccagcctgggtgacagagtgagactccatctcaaaaaaaaaaaaaaaaaaagagtttacttgtttcctttcccataaagtattaaacgctccattgctgctaccgaagctctctacgcatgtctgcttctcctcacctatgcaaatctagatctatcataggtaggtctatcatacagatcttcctctcatctaatcctgagctcctgctagacaaggagtatgtggaaggttttcaggaaacacagccccttctcttgagggagtttatggtgtgaaacaaaattcaggaaaactgatcacccaggtagatcccagtctggccccaagacattttgtttggccttcatggccaaggtcggctccaggatatgcaacctgggcagctgcacagggccctgatctcagaaggccccatgcttggtttaatgcttcaatactgatgtcttaaaacccttcacaaatttgaaccaggggcaccagagtttccatttacggtgggccctacacgtaataaagctcttcataagtctggcttgcaccattaattattctttttttttttttttttttgagatggagtctcactctatcgcccaagctggagtgcagtggtgcgatgtcagctcactgcaacctctgctgcctgggttcaagcgattctcctgcctcagcctcccgagtagctgggattacaggcacctgccaccatgcccagctaagttttgtattttttagtagagatggggtttcaccatgttggccaggctggtcttgaattcctgacctcgtgatccacctgcctcagcctcccaaagtgctgggattacaggcgtgagccaccgcgactggcctaattattcttttttaaaaattatttaattacacttaaaaagtaggatgctggggatgatggctcatgcctgtaatcccagcactttgggagaccgagtcgggtggattacttgaggtcaggagttcgagaccatcctggccaacatgacgaaaccccatctctactaaaaataaaaaaaattagccaggcgtggtggtgtgtgcctgtaatcctagctactagggaggctgaggcacgagaatagtttgaacgcaggaagggaaggctgcagtgagctgagatcgcgccactgaactccagtctggataacagagcaagactctgactcaaaaaaaaaaaaaagggaaaaaatcaaagtattttctttccctctgagtcttcctgttggctgagaatggcgccagtgataaaacagtagtttgtctctgacttaaggaggcaaggagatgtgaagactcagcgcagtgtggtgtcttgggtgggattctggaataggaagaggacattaattgaaaagctggtgaaattggaataaagtctgaagctgagtgaatagtatttcatcaatgtaaatttcttagttttagtaaatgacttaggattacgtaagatgttaataattagggaagttgggtgaatggcccgtgggaacgctgtaggtctgtaaaaatcaaattatttcagactaaaactaccaaaggaactacaaagaagatagaagagtttacgatgtttcccattcttcctcaatgctttaatattataataattaataatacatacaataataatcatacattttattttgggaggtattatttaaacttttttttttttttgagactcactctgttgcccaggctggagagtagtggtgcgatcttggctcactgcaacctccgcctcccgggttcaagtgattctcctgcctcagcgtcccgagtagctgggactacaggcatgtgccaccacacccagctaatgttttgtatttttagtagagacagggtttcaccgtgttagccaggatggtcttgatttcctgactttgtgatccgcttgccttggcctctcaaagtgctgggattacaggcgtgagccactgtgcctggctatttaaacttttatatatatatacatatatatatatatatatatatatatatatatatatatatgtatatatatgtatgtgtatagataaccatatatataagtttttttaatgaatacatgccatgataccaaattcataggtacaaaggattttgagtctcccttctgttttcaagtcccttcctgttttgagtcttccctcctgttttcaagtcccttccctgtggaaaacttattatttcaagtttctcatatatatttcccgagttattttatgaatctggaagcaacctctgtggtatgtattgtgtacattttcttttcttttcttttctttctttttttgagatagagtcttcctctgtcgccaggctagatgcagtggcacgatctcggctcactgtaacctctgcctcctgggttcaagtgatcctcctgcctcagcctcccaagtagctgagaatacaggcatgagccaccatgcccggctaatttttgtatttttagtagagatggggtttcaccatgttggccaggctggtctcgaactcctggcctcatgtcatgttatcctctcacctcggcctcccgaaatgctgggattacaggcacgagcctccatgcccggctgttgttatttcacagtgattttggcgtcactgcgtacctgccagcacctcctcactctttgccgtaactgctgcatagtattccttttaatgaattaatttctgtcaccggtctcctatgaatgagtatttaaataatttctgctcctgtgctcttacaatcagtgctgcaacaaataaacttgtacggtatttcatgtgtgtgggagtactcctgagggaataaatatctaggagttacacacacattttggagaaaataatgaaaagcaaatctccactgaattttcccattcaaggcttgagaggtgataaaacacattctcggaggccagtgtcttgttttggaaacaccacgttcaaggaggcacccgtctgcagccccacagaggcatgagggcctgcttcagatcactaatctggcattaataccctcctgaaaggggggcggaggacaatagcacccagagagtttacacacttgagaaatgactggaaagtaattggagctggtagccatctgcctggctctttctttagagagccagcacgtctatccactgcaggcaccagaagagcctcatgtgggcttcagtctccgtcagagctcacccatcattctgggggcccgagcaggagctggttttccctgaagctctcacattcatctccaggctgaactggctttgaagaaagatgccaccttacccatctcctctgtctgccaatgagaaaagaggacttttttttttctggcctttcagcatttcacaatattcttcaaaatcgtttcttcttttcttggtaaacaatgatcgctacttgtgaaatccagtttttcatttcacttggaaagaaagactatttcattagctcatgagctttttttttttgagacagggtctcactctgttgcccaggctgcagtgcattggcgtgatcacagctcattgcagcctcaacctcccaggctcaagtgatcctcccacttcagcctccctagtagctgggactataggcacacaccacaacacttggctcattttttattttttgtggaaatggggtctcactatgtcgcccaggctggtcgccaattcctggatgcaagcgatcctcctgccttggcctccgaaagctctgggattataggcatgagccaccatgcccaaccttatgagctttttctatctgtcccagctaggggtaattgtctgagctgctcacaaacctgcaaagctcagagtggggactgctcttgaaagctatgatgatgattaataataataataaaattatactagctaccatttgttgagaaattattgttttacaggttgctatggactgaatcgtgtcccctcccaattcatatgttgaagccctaacctcaaatgtgactgtatttggagtgagaaagtaattacggttaaatatagtcataagagtggagcctttatctgatgggattagtgtccttataagaagagacaccaggcctggtgaggtggctcacgcctctaatcccagcactttaggaggctgaggcgggtggatcacctgaggtcaggagttcgagatcagcctgaccaacatggggaaaccccatctctactaaaaatacaaaattagccaggcgtggtggcacaaacctgtaatcccagctattcgggaggctgaagcaggagaatcgcttcaacctgggaggtggaggttgcagtgagctgagattgggccattgcactctagcctgggtgacaacagtgaaactccatctaaagaaaaatcccaaaacctcaaatttgtcaagaaacacaattttggagctggcaggttgcgtgaactataaactgtatataatatagccatatgacaatgccagcaagttgataaacagaaattttttgaactatgaaagttatttggttgcaaatcctttgcaaaaaatgtgtctgctctgtatagagtattgaatgaaagtatagcatgtagatttttacaagcctacaggtacataaatacttttgatttttctcaatctgtagagatttgctataagatagtctttgggctaggcgcggtggctcacgcctgtaatcccaacactttgggaggctgaggcaagcagatctcctgaggtcgggagttcgagaacagcctgactaacatggagaaaccctgcctctactaaaaatacaaaattagctgggtgtggtggcgcttgtctgtaatccagctacttgggaggctgaggcaggagaatcgcttgaacccaggaggcagatactgcggtgagccgagatggcgccattgccctccagcctgggcaataagagcgaaactccatctcaaaaaaaaaaaaaaaaaaaagatattcttcggctgggcatggtggctcatgcctgtaatccccgcgctttgggaggctgaggtgggcagatcacaaggtcaagagattgagaccactctggccaacatggtgaaaccctgtctctactaaaaatataaaaattagctaggcatggtggtgcacacctgtagtcccagctacttgggaggctgaggcaggagaatcacttgaacccaggaggcggaggttgcagtgaggcgatattgcaccactgcactccagcctggtgacagagtgagattcaaaaaaaaaaaaaaaagatattcttcaatcaacactctgtatacttctgtataattcttcacagaaattattcctcagataacctgcacttaccatcaaacttgtaattatccccacacatacaaagttgcctttgaatgtgatgtttctatagagtacaaagctgaattattttattttatttatttattttgagatggagtttcgctcttgttgcccaggctggagtgcaatagtgtgatctcggctcatcaaaacctcttcctcccaggttcaagtgattctcctgcctcagcctcccgagtagctgggattacaggcatgcgccaccacgcccggctaattttgtatttttagtagagacagggtttctccatgttgatgaggctggtctcaaactcccaacctcaggtgatctgcctgcctcggcctcccaaagtgctgggattacaggagtgagccaccacacctggccaaagctgaataattttagattgttcctgtgtgtgagtcttctggaatgtctctgggcatctggagtcaaaaagtgtgtttattctttagtgaaaatgattgccattgttgtgagagatattgaaaaatgacatcaaattgctcagaccttgcagcaaatcacagtggaaacgcctattaaatctcatatgctctttgaatggtctttgttaattggagccacagcacgaatgacaaagagacactaaaattatgacggaggattgcttcctgtcttacctactatatttgggtctattctcatttcagtgaatgagtcacagtgaggtacaatttgtttttccaaagacaaaaagaaatagaataaaagaggagttggcaacattttttggtaaatggtgagatattaactattaaaaaaaaacatattttaggctttggaggccagatggcctctgtagtaactttttttttttttctttttgagacagggtgttgctctgacgctcaggctggagtgcaatggtgtgatcttggctcactgtaacctccgcctaccgggttcaaatgattcttgtgcctcagcccatagctgggattacagtcctgcaccaccacacctgactaatttttgtatttttagtagagacgggatttcgccatgttggccaggctggtcttgaactcctggcttcatgtgatcctcttgcctctgccttctaaagtactgagattacaggcgtgagccactgcgcccacctggcctctctgtagcaactactaaactctgccttgccctgtgaaagcagccatacacaatatgtaaatgaatgagcatggctgttttccaataaaactttatttctcaaaacaggcagtaggcttagtttgccaacccctggaataaggcataaatatttaaagatatagatatgaattggctgggcacagtggctcatgcctgtaatcctggcactttaggaggccaaggtgggcagatcacctgaggtcagagttccagaccagcctggtcaacatggtgaaaccctgtctctactaaaaatataaacattagctgggcatggtggtacgcacctgtaatcccatttactcaggaggttgaggcaggagaattgcttgaaccaggagttggaagttgcagtgagctgaaatcatgccactgtactccagcctgggcgacagtgatactctgtctcaaaaaaaaaaaaaaaaaaaaagatatgaagtgatagacataaacagataacttgaagtgtggcagagaatgttacctgccaacccaccatccctattctttgtgaacagagccaccatactgttggggtcagcaatgtcctcagttaaatatatctatatcctagtctcacttgccaataggggtgacttctgaagtgaaagcagatacagatgagacatgtgggaatgctctgtaaaaaggccttatcttccttttttttttttttttttttttgagacagggtctcactgtatcgcccaggctggagtgtagtgatggtgcaatatcaattggctcactgcaacctccacctcccaggctcaagtgattctcatgcctcagcctcctcagtagctgagataacagttgtgtgccaccacacccagctaattttttatatttttagtagagacggggtttcaccattttggccaggctggtcttgaactcctggcctcaagctgatctgcccgcctcagcctcccaaactgctgggattacaggtgtgagacaccatgcccggcctaggctttatctcttgggcaggtgccattttgccttctacttttcttttttttatctgcctggaatatgggaatgattggtggagcttaagtggcaattttgtgactaagagggcaagtccgagaaaatattggaaatctcatcctttgcatcctcgaaccaatgaatcaaaccagcaggagctgacctctggacttcttgttatatgaaggaaacaacctttctatgcttaagccactgtttcatttggatctgtatttactgctgaatcaaaattccaatacttttaatagaaataacaaacatatagtccagcttacaagtagtagaagtaatagtaatttaaggctatgtgaacaatagagaggtagtatttcggattgaagacttcaaatccatcagttggatctgggtgtcaaatcctgccctcaccactaacttggtggtgttttgttttgttttgttttgttttgttttgttttgttttgtttgagataggatctcacactctgttgtcagtgctggagtgcagtggtatgatctcggtttactgcaacctccacatcctgggctcaagtgatcctcccacctcagtctcctgagtagctgggactggtggcacacaccatcacgccctgctgatttttatatcttttatagagatgggtttttgtcatgttgctcaggtgggttttgaactcctgggctcaagcaatctgcccaccttggcctcccaaagtgttgggattacaggcgtgagccaccgcgccccccacccccaccacttactctctctattcctcagtttcctccctggaaaaatagagatcataatattatatgatttatggtattgttgaaagacttaattatgataatgcatacataaagtacttggcacataagaagtgctcaaaaaaagagaatattattgttgctgctactattatcattttgttgaccagagatgaatgactattcacttctctgaaacaagggtgcaggtgaaaacagcgatgacatttcttccccactcctcactcttcaggcctctccatcatctagaacaatacgtggaaatccactcacgacctccgtgtttttaataagtatgacgtgtcgggctgagtgcttggttccgggagttctgggtgatggagacagttcctgtattcagtgttatcagggcagagtgagcagaggtagcctggaggacaatcaagaataaaaaagtgttgggtggagaacagaaatatgaatggggtacaatggggagaaaccaagaagaggttcagttctattattgggtgggaaagcggtctaaaaatattttatagaggaactggtatctaaaatttgagtattgaagaaggtggtgttggctattatctactattactaggaagaatttttttttgagacagagtctcactctgtcacccaggctggaggtcagtggcattatctcggctcactgcaacctctgctcccggactcaaaccatcccaccccagcctttccagtagctgggactacagacacgcaccaccacgcctggcaaatttatgtatttttttggagacagggttttgtcatgtttggccaggttggtctcgagctcctagactcaagggatctgcccacctcagtctcccaaagtgctggaattacagctgtgagccgatgtgcctggccaggaagaatttaaaatcagtgatggcatgtaaatatttttcttgttctttttttttttttttttgagatagagtttttgctcttcatacccaggctggagtgcaatggcacaatcttggcccacttcaacctctgtctcctgggttcaagcgattctaaaatatttgaggtgcccgccaccatgcctggctaattttttgtatttagtagagacagaggttcaccatgttggccaggctggtctcgaactcctgacctcaggttatccaactgcctcagcctcccaaagtgctgggattacaagcatgagccactgtgccggccatatttttttttttctttcttttcttttctattttattttattttattttattttgagacagagcctcactctgttgcccaggctggagtgcagtggcagatctcggctcactgcaagcttcgcctcccgggttcaagtgattctcctgcctcagcctcccgagtagctgggattacaggcgcccacaaccacgcccggtgtatttttattagagacgaggtttcaccatattggccaggctggtctcgaactcctcctgatctcaagtgatccgcccgccttaccctcccaaagtgctgggattacaggcatgagccaccgcgcccggcccggccatatttttcatctcctcttccggatctcctctccgaccctgccctccggcctccgtggtggccttccctggacggtattcacacgttcccctactctatagtttccagttgggtttagccaacgggagacacctggaggagatggagggaggagaaagggaggttggagcatgtatttccctggcgccctctctgctaggttgccccaggttggctgcatctctctcctgaaggtcacagtcctggtcaggtcgctttctctacagctgtgttcttcagattctgggaaccacacctacctttgcctttctggcctgggggcaagaatggctctctgctgctgcgattagcctcagggcgttcactacttcttgctcctctctctctctctctttttttttttttgagacagagtttcgctcttgttgcccaggctggagtgcaatggcgcaatctcggctcaccacaacctccgcctcctgggttcaagcgattcccctgcctcagcctccggagtacctgggattacaagcatgtgccaccacgccaggctaattttgcatttttggtagagacggggtttctccatgttcgtcaggctggtctcgaagtcccaacctcaggtgatccgcccaccttggcctcccaaagtgctgggattgcaggcgtgagccaccgcgccctgcctaatgctaactctattttaagggggcatctgtttcctgctgggatcctcactggcaaactcaaatgcccaccagggcaggatacgggtaaagtggtcgaagtgtaatgcaatagggaggggtggtgactggtgaactggagagccctgaaatgggcacctgctactataggctccagctgctggtgccctttgagagtatgattctagcattaatttttcctttttttttttttgagatggagtctcgctctgtcaccctggctagagtgcagtggtgtgatctcggctcactgcaacctccgcctcttgggttcaagtgagtctcctctaccattaacttttctaattaaaaaaatttttaaactttttctaattttttctatgtaagctgaaagtatacattttattagaagaactttccacatttataaaaacattctctgggccaaagagcatgtgcttgaatttgacctgtggctgacactgctataagggcaacagccctggtagtcagagaatgagttaaactatgataatattaagtattgtcaccttgtgcagacacagcatgcattatttcatttaatcgttaggacaatatcaacttgagggaggttatattgctattatatagatgagatccctattatatagttaagaaaactttttttttttttgagatggagtttccctctgttgcccaggctggaatacagtggtgcaatctcggctcactgcaacctttgcctcctgggttcaagtgattctcctgcctcagcctcccgagtagctggaattccaggcacccccctgccacacccaggtaatttttgactgggtttcaccatgttggccaggctggtctcgaactcctgacctcaagtgatcccccgccttggcctcccaaagtgctgggattacaggtgtgcgccaccacgcaaggtgagaaaactctttaaacagtttcaaggaggttaaatgcttcaactaaggttgcctctggataagaatccccagtaggattctggagcctgggaacttcagctgagactctctgctaccttcttggctgagttcttgagtggggcactgggcttcggactgtgatcatctccctgcctgctgcacagacaaaatcaatccactcagaccatggcacgacaataaagaaagagtttaattaatccaagtccagctatgccatgcgggagatggagttactactcaaatcagtctccctgaaggcttggagcttagggtttttctggacaatttgatgggcagggggctagggaataactgctgctgattcgttggggaagcaatcataggggtgtgcagaacttgctgttgggtggagccataggaccagttgagccatgagtcacgagtcctcttgggttcaatctgaacaaaaatctaaaaaaaaaaaaaaaaaaaaaaaacactgggtgcggtggcttatgcctgtaatcccaacactttgggaggctgaagcaggtggatcagttgaggtcaggagttggagaccagcctggccaacatgatgaatccttgtctctactaaaaacacaaaaattagccaggcgtggtggtgggtgcctgtaatcccagctacttgggatgctgaggcacgagaattgcttgaccctgggaggcggaggttgcagtgagttgagattgcgccattgcactccagcctgggggacagagactctgtctcacaaaacaaaacaaaacaaaacaaaacaaaacaaaacaaaacaaaacaagtgcagttttgttgcatggatatattgcataatggtgaagtctggacttgtggtgtagccataacctgaataatgtacattaaacttattaatttttttaataattttttttagagacagggtcttgccatgttgcccaggctggtctccaactcctaggatcaagtgatcctcccacctcagcctcccaaggtgctggaattacaggcgcgagcaccatgcctgaacacattaaactcattaaataatttatcatctctcatcgcccccactcccctcacccatctgagcccccagtctattatgccacactctgtgtccatatttatttatttatttagaggcagaatctagttatgttgcccaggctggactcagactcttggactcaagccatcctcctgcctcagcctcctgagtagctgggactacagacgtgagccacctcacgcagcataagaaaaccccaattttgtttcaagtgagaaaatattcagacccaaagaattaggattggtctaagtatgaggtgacaagcatggagaagaaaagtcaacctgtgaacaagggtagagcagagaaggagatcaggtctataccacatggttccttcagtcttcttgccgtgtgaggtaatgaaaggtgtttcttgcttaagctattgttagtcggataagcagtgaattcctgctgcaaggattcctaactgcaacatatgcaatggagttatattagataaggagaaaaaaaataataggagaagacagagggcagatagaagaaagtaattaaaaccagcagtcaggcattttggaattcagacctcattattttcattttccagatgagaaaactaaggttccagagaaatgaacataacttgttcaacatcttaaaactagtcaccagcagacctggaattcaaacccagatctattggataccaaagactggtttgaacaactatatgtaatgctttgtattggggtgtgtgtgtgtgtgtgtgtgtatgtgtgtgtaagggagagagtgagagctagagagagagagagagggagaactaatggtcactgtttgctatgtgtctggttatgtgctttacacttttggcatattgcttttcattcttaaatacagcttcaaatttagttgtcatcttcctcataattttataagaaaacggaaattcaaaaagttgagtgactttaataattgaatattgcccaaaagaaaaaaggaaattctctatgccacctgaggtagatctaaagaatttttcccatctctatgtgcagtgtatctttgtagaccctcccatgaagaagtggggtcactttttttttttttttgagacagtgtctcgctctgtcacccaggttggagtgcagtggcacgatctcggctcactgcaagctctgcctcccaggttcatgccattctcctgcctcagcctcctgagtagctgggactacaggcacccaccaccacgcccagctaattttttgtatttttagtagagacggggtttctccatgttggccaggctggtcttgaactcccgacctcaggtgatctgcccgcctcagcctcccaaagtgctgggattacagccatgagccactgcgcccagccagagtcacttttttaccctttgaatctgggctgagccatgtgatttgttttggccaatatgtcattagcaaatgttgggggaaacagaggcttccaaagtacttgtaagcagtactttgctctttgggaatttttactgtcaaagtaagctctgccgggcgtggtggctcacgcctgtaatcccagcactttgggaggccgaggtgggtggatcactcgaggtcaggagttcaagaccggcctggccaacatggtgaaaccccatctctaccaaaaatacaaaaattagctgggcatggtggcaggtgcctgtaatcccaactacttgggagaatgaggcaggagaatcccttgagcccaggaagcggaggttgcagtgagctgagattgcatcactgcactccagcataagtgacaaagtgagaccctgtctcaaaaaaaaagtacttgtaccttggggtttgccttcttacttctcctgggaaccctataacttcatgtgaaggagctagcctgttggatgatgacgtccagacatgtgacccagttgctcttgttacccaggtgatggcccccaacctccacacatagacaggaagccgtcttaggatcatctagccaccagctgaccacagacacctgggaatacccagcagtgatcatatgagctggcccagaaaggaagaacctctcagcccacctataaagtcacgagctaaacaaatggttgtttttagccactaaatgttggagtggtttgttatgtggcataactaatggatacactgactttcactatatcagacaaatattgcaaataattgagtgaaatggatagatattgagaatgtttaatgtaaaggtttaagttaaatctatcttttatgcaaaatacatgcccatgttctgttccctttttctttttcttttttttttttttgagatagagtctcggtctgccaggctggagtgcggtggtgcgatctcggctcactgcaacctctgcctcccgggctcaagcgattttcctgcctcagcctcccaagtagctgggactacaggcacatgccaccatgcccggctaatttttgtatttttagtagacacagggtttcaccatgttggtcaggctggtctcgaactcctgacctcgtgatccacccgcctcagcctcccaaagtgctgggattataggcgtgagccaccacacccggccaaacataactcttcttatagttataatgattccgtgaaataggtcctactacctccctcttttttgttgtagttgatttttaatttttaagagatgaggtctcaccatgttgcccaggctggacttgaactcccaggctcaagcaatcctcccacctaaacctcaggtgatctgcctgcctcggcctcccaaaatgctgggattgcaggcgtgagctacctcgcccagcctgttccctttttcattagtgataagatccttggccattaaaagttgtcagtgaagaaatatagtgtcccagtgacgaggagtatgaaaaatacattctattttcacatcttaaatgtcattaagatgttgaaagtgttaaatatcaaattcaaactcaactaggtttgaccagcttgtcccagtttgtctgggatttttacattttagtactgaaagtcctgtgtccaaggaaacccctcagtccaggaaaaactgggacagttgctcactgctatgttttgttttgttttgtttaaatcagcctacatcatgctttgatctgctgcagtttgaacacattccctttaaaatttatatgtaggaggccgggcgcagtggctcatgcctgtaatcccagcactttgggaggccaaggtgggtggatcatgaggtcaggagttttagaccagcgtggccaagatagtgaaaccccgtctctattaaaaatacaaaaattagccaggcatggtggcaggcgcctttaaccccagctacttgggaggctgaggcaggagaatcgcttgaacccaggagatgaatgttgcagtgagccgagatcacgccactgcactctagcctgggcgacagagcgagactccatctaaaaaaaaatatgtgtgtgtgtgtgtgtgtgtgtgcgcgtatatatgtatatatgtgtgtatatatgtatatatatgtatatatgtgtgttcatatatgtgtgtgtgtgtatatatatataatatgtaggaacttaatccctaaatgatagtattaagagctggggcccttgggaggtgattaggccgtgaggactctgcccttgtggatggaattagtgcccttatagaagggcttgaggaggagagtttttctctcctactcttctgccatgtgaggaccctgtgttcattccatttaggggacgcaacagcaatgctccattttggaagcacaggaagtccttactagacaatcagtctgctggtgccttgatcttggacatcccagcctccagaactgtgaaaaatacatttcaattatttataaattacctggtctgtggcattttatcgtagagcaggaatggactgacaaaggcacctgaagctcaactttagtgttagttccagcagggaggaatcttgcaaattcttattgatatatgacaatagatatttagaagctaagaagctgagtattttctcacacgtttaggtgtaagttacaaattagtcctgcttttgatacacagctacttcatgagtttgccctaactgctcccagataagtcatattcctttgagaagtcccaattggcaaaagttcttttttttaaatgcctcttgtaaaaattatcaattttttaaaaaatgcctcttgtaaaaaccatcgacacaatttctttttttttttttcagacggagtttcacgcttgtcacccagactggagtgtagtggtgtgatctcgactcactgcaacctcccccttccgggttcaagcaattctcctgcttcagcctcctgagtagctgggtttacaggcacctgccaccatgcccagctaagttttgtatttttagtagagacggggtttcaccatgttggccaggttggtcttgaacttttgatctaggtgatccacccaccttgccctcccaaagtgctgggattacaggtatgagccacccctcctggccaagattcttgaatgtgtgattagtatttatggaaactgaccctgtatataataatcttctgccttccttacctgcaagtcatgaattatatttatgaactgaatgtaagaaaaatctatgtgtcatttattcattcactcattcattcatctctctatccaacaatattattaagtgcccagtagatgctatgtactgtgctaagagatgaagataaataaaatggtgagcaaaaatggacactgttgaccgggctccttggctcacacctataatcccagcattttgggaggccgaggcaggcggattgcctgaggtcaggagtttgagaccagtctgaccaacatggagaaaccccgccctacttggtcatcaatccttgacattccttgcagctagttcactccaatgtcttcttctgttgtcacatggctttctccctgtggatctgtgtcttcttataagggcaccagtcccattggattaggaacccatcctatagtattggtacactctactgaaaatacaaaagttagcctcgcgtggtggcacatgcctgtaatcccagctacttgggaggctgaggcaagagaatcgcttgaacctggaaggcggaggttgcggtgagccgagattgcgccattgcactccagcctgggcaacaagagtgaaactccatctcaaaaaaaaaaaaaaaatagacactgttcttgccttccaggaatttttagtgttgtggagtagaagacagtcatccaacaagcagataaatgcaaagctacacccatgacaagactagcaaacaagaagtggtgttataaaattttgtggaattaaaggaatttgactttgttggggggcagagtcatttaagaaaggcgtccccttcggacaagggagccaagatctagaggtgaaatgagaatagaggttggagtgaggaaggggaaaatattccaagcagggggaaatgtaaaacatttgagcaaaatcctgtggcaagaggcaacctggaccatttgaaacagggctgtgcgcatagaatcaaaaaatagggcaaagggtgacagaagagaaagccagagtgggagacatgggcctagctgaagagcatctcaaagcctgtcatgagttggaatgtgtccctccaaaaagatgaagtagagccctatctgccagtatttctgagtaggaccttatttggaaacagggtcattgcacatgtaattagtgaagatgcggtcataccgtagagtgggttcctaatccaatgggactggtgttcttatatgaagacacagatcaccaggagcggtggctcacgcctataatcccagcactttgggaggccgaggcggcagatcacgaggtcaggagattgagaccatcctggctaacacgatgaaaccccatttctactaaaaatacaaaaaattagccaggcgtggtggcgggcgcctgtaatcccatctgctcgggaggctgaggcaggagaatggcgtgaacctgggaggcggagcttgcagtgagccgacatcacgccactgcactccagcctgggggacagattgagactccgcttcaaaaaaaaaaagaagacacagatccacagggagaaggccatgtaacaacagaggaatacattagagtgaaccagctgcgaagaatgtcaaggatcgattgccaagtaggtcgaggcaaggaaagagtctcccctccagaagaaggtggctctcccgacaccttgattctggacttctagcccccagaactgttaggaaataaatttctgttgttttaagtcacccagtttgttgtacttggctatgacatctgtaggaaattaacacaaaggccacagtaggattttggtctttgtcccaagagcagcaaggaagcatggcaagaatttaaacaaggaagggagagcggaggatgttggtctggctaaggtggggatatggaagggaaggaaacaagagtgtgtgcaaggcagaccagttaagaggcttgggcgagggggactgcttaggaggctgcagggagatgagttagcagttgatgtggttgtccgggagagagatgacagaagcttggaataggtgttaagggtaaagatgaagctgaatgaaaggattttggatccctatggtgagtgagatacagagccatgtcaacaatgacttcaaggctttgggctcactcaactggatggatgggggcgccaatcactgagcaagtgatcctcagggaagatcagactccacttagcacaaggtctctcagccagcagaatgagtttcaatgttcttaaagcaaacacaccccaaagaaaatttccttttgaattgtaataaatacactctgcaatgccttctgtttttacagaataatatttctgggagaccggtacacataagcacttggaagttgatctctttcttattaataattgcctgataattcattgtgtggatataagataatttaaccaatctatttatgtatttagcttgtttccagattttaaattatttcattgcaagtttttaaaaattttctagcttcatccattaaaagaaatacttttacattgttaactactatatacacatacgacacacaaatacacacacacacagcaaaaagtttcacaaaatagtacttatcctacctatatgtcattctattctattctattctaattccattccaactaaaagtaatagccatgacccactaaattgatcttaccacctactgacaggtcacaacctgcagtttgaaaaacactttcaatgcatatttattcaatgaaaagggacaagtaggccaggcgcagtggctcatgcctgtaatcccagcactttagaaggccaaggtgggaggatcacttgaggtcaggagtttgagaccagcctggctaacgtggtgaaacgtcatctctactaaaaatacaaaaattagccgggcgtggtggcaggtacctgtaatcccagttactcgggaggcagaggcaggagaatcacttgaacccgggaggtggaggttgcagtgaactgagattgtgccactgcactccagcctgggcaacaagagcaatacttcgcctcaaaaaaaaaaaaaaaaaaaaaaaaggaaaagtacttatttatactccaatactgttctgaacattttgtaagtaataacttaataatccttacaatgacagtgtgccagtgggctaagaattattatctctccgttttccagatgatgaaactgagacacagagaggtagacaagttacccaaggtcacatgctagtatgtcggagagctgtgcttaaaccccggcggtctggctgcagtttatgctcttaatcatcagcctatggtatttcctttagccttaggaattgatgtgagactaaccaggtatttagcaatgcacagctctaaatagcctctccagtatttcaaaccacggcagggcaggttcctttacaagatagtcaaacaggacataagtgtattactctgctatttatatacctccatggctctagaaggcaaacaaagactcctgaaatttaataatctcctccagaaacttagcttcagcaacacacacacacattctctctctctgtgtctctctctctctctctctctgtctctctccaaaagccccaaaccttcaagctcccaaataatcaatgatgaccactctcagtgctggactgaacgataatattacagtcacttcttattcagaggtagtgctcaacttccccattatttattgattttcccccaaagttatcaagttctaaagcctaattattggtgtaatagctgagatgttaagagaattgtaagcccctttagctaatgcatggcatatgttgaagggattcagctaattcacatatctgtctgcactattaatagagaaggttacatgccaattatccaggcttcaatcagcctgtttggatacaatagaggcagtgttcacacacttgatgtgccacattccttcccgacatcagaagcagctggtccagataaagaccgctggggttttgatatttaggaatcacgtccacggaagagctggagttgagacttgattgcttcatggacaaattccctgcaggtatctttaacctggactcttttgaaaaatgcctagtaggtttgcagttcactgggctttacacttttcctgctcagacttgttgggtgggtgggtgggtggaggtgctgaggaagaggagaaagacaaaggagcaaatagctccaaggacaaagcagggaataataggaacgggcaaatggattccaataaaataaagaacccgcacacattcttgtgcccagttttagaaccaaacaggctaagacattttcctcctaagagctcaacttcgtgtgttgaaaaataggtggatggataaatatctctgtatatttcacctgcattcttttctttttatttttttcccctttcatttctttttttcctctgattcagaagctggactggaagtgttgtaatatcatcagaaaatgctgcttccggtggtatttttaaccaggaacagaagctgaagtgtctgaaaccaccggagaaagcccctgctctcctgagagctgttctctaattttgctggcagagagcattggatcagtgatcagaaagttaaaatggcagatgttggggcttctagggggaggggaggcagatacctgatactctccggcatttgtttttttatccttccccttaccttcctttctcggatcacaatatccttccccttaccttcctttctcagatcacaaaacagagctggcgtccacttttctaaggtcacacagccaaatgctggcacaacagtaaacaaacaaacaaacaaaaaacaaccatccccaggacctgcctctcaggctgcatcctgaccctcctgacatttctcaaatacagcagcagacctcaatactttttacaaaaatcaccaaaagctaatcaacaacaggcagatagcccatgtcagccgttgtttcatgtgctatttcagctccgtgtgtattttttcaccctcccagatgaaaatacagtaattaactccatacagaggggggatggagggaggaaactcccttttttttttcccttcccctagacttgaaaagaaattctggcagataatttggctgaacatgaaaagggagaggctgcttacagccgcccagataaagtgctaggttggtgaggctttgcgggctaagttggttatttcacgccatgaaaagcagacatttatctgttcccatggagatgtgatttctactagtcaatcaggcactggggaggtcagacaatagccagtggttccctttttcatctcaagagacagtccattcctgttctattgtaacatttcacctacatttaaaggaatctaaatgatctctccgaaatacctgcagacgcagccattatattttcaagtgatcaaaattagcagacattccagctgcctcagaggtagacggggcgtgccccccaccccccagtttcagatcataggttgttccagcaccatccttatttggataattttggcttccacacttgatccttccctcctgaataaaataataaggtcataaattacatgttaaaatttggggagtgggcagaggacttcaaacagaacatcgcgggagcaagagaacgctgcccagaagagagcaaagcccagaactactgcaagtttgataaactgtaaactttgttcccggtcacaggactgggaaccgcctgaaaactgcacatgcagaaatgattagggctgttatttgatcttcagtgtttgctatcaatcccagaaagcagatcatgtctatttgccaaatatgtttatttcagtaggtgaattgcagtgtaagcacctagaaactaggattcacataaggactttgaaaatgatctccgaagtgtctctttttcccgcatcattttcacacatgcctaaggcagaagaaaacgtaacgggggtggggggccttcttcgagctaattgagaagcaagaggctatttccatgggatcccatttgaaaacgctgtctgagaggcttttccaactctcagagcatatttgagacgcagactgtcaaatgtgacttacacagaaggccgttcacaggatggcagcgtaacagaaaacagcagacaggcaaggccattaagtaacttcatgcttgttaatgggagtcactcaagtgcagctcaactgcgcaaggcaggaaagtaaacacaaatacgactcctggtttgccacaagcccggcctctgtagtgagagagctgtgactgcgtttccagctccttgaaggcagagagactcctgcctttcggggcgggcgggctggaacaaagacaccaacggggccacctcggaaagtctttttgagcagtttcagcaaatagcatttaagggaagggaaaaaaactccaatgtactcaataaggtacagtataatatcccattattgaggagccaaaaagcagggatttaccgcaaacgtttttgggagctcgatttctctggaaagacagggcacgcatttctcatgtatcgtgggccagtatttgaccatttcctgtgaccatttctttacataattttctcagtttagtttttaaaaattaaaatagaagtcatacctaatctctttaaaacgttcaaacagtataaaattaaggtaaaggagttgaagttcctcattccttttgctcactcccacgcagctcatgatctcaccagagatagctaataactactttttaacagtgtgaaacatattttccagacgttttccataaaatgcacatatacaaatacacatgctttgttttaaatacaccactggtatcatatttatagacactgttatacaacttgcttttttcactttgagtatcgatcatggacaatttccaatgtaggtatttttctagtgagctataaattttggggaaccatgtcatacatgctcctggggaaaattcaaattatagggcttgtggggaagggtgggtctccctcctcccccgcagacaatgactattagcagtttgtagtgtctcatgccagaaatagtccacgcatagatcagcatatatgcatatcgaacgctcacacctttctttgtctttacacaagtatctttcagcttgcattttccacttaaatctcttggacagcactctgtgttagaaaaacttgatgttttaagtggtggcatagtatttctttaaatggtattccttaatgtatttcacttgccctttttcacagactttttggtggctttcagtgtttgcttctacaaacagtgctacaataagtagtctggtgtgtacccagtgattctctgctcaaacacactcactcctttctgaaagcgactcctattacaccacacctgtcctaaagttgctgtaatccaaagaaaaatggatcgaattaactttttttttaaaacgagggttttaagcagaacattattaacccattaaaaatctgtgataataaactcgtgccctttcctgtggtttttagtctctccttcagcttgagagtaagagattcatgaaaatgaaaagaaaaagtctatcccatcctcacctcctcatcccctatcagccatgtcaagatcactacatagcatcccatgcctgcttattacaaatgcatacttcacactgagtaattcctttccatctactcctttcatcttgggctcagagaaagatcgcagctcacgcttacaacttaggtgcagacttctgctctttttttgtgtgcaggagtaaagccactggggatttagaacaaagtgtgtccttggaaagaagtgggtagaattttgtgtgtgcagtaggtgggggagggaaccccctcccgagggaggagttcgatttcattatacagttggaaacccggtgaaatcatgtatacgactggatcttttcgctcagcgagtgaggtctttttgttctttgtcttgcagtgtgtacagcaaatttctgttgtgcctgggaagaaggaaatttgagttaaagaggaggcccgctccatatgccttgtcacaagtacactcactgaaacattaattcacgaagagattgcaacaagaccaaaacgaaagaggaacagggcctgacaatgttcagagaaggaaaaccgaagaagtaaccatccccaagttaaaaatgacgtggggatgaaaaaataggttgcctgttgtatttgtcattgaaatgcacaatcttgtttactgtttatcttgagactctgggagctctcctgctgcttaggaaaaaagaggcaaaggtttaggaagaaatgctagtcataagaaagagaggcattagaaaccctagagagaatgggaggtgtaaatagtatgtgggcatttggcaatcaccacaaagaaatgggagacaaaggcaagtgtctgatgccagaaatcctaaaaacttgagtggaaaacccagacacaataaaaatgtccaaaagaaaaaaaaggcaaaatcccatgagatctttttttttctctgtgatgttacctaatggagaaaataaaggtgggttttgccacagtgatcatggtgccgtatcctaaaggaagtagcttcatgataagccttcagaggctctctccaggccagccccagccttaggacaaaatgggacaatcttgggggacaatttctttctccaaaaaggggatgagattgggcagaagaaacacttgcagggcagagttattatctctctccccgaagagtttaatcaattgtggtcatttacagatctctgtcgttgtccttttctctctccctctttctttttctttctttctttctttctttctttctttctttctttctttctttctttttctttcttctttctttctttttctttctctctctttctttttttcttttcttctttctttctgatgactttgccttgaaaggaattgcttaggaaagagggaaaaggcatttttagtcaaaagctaagctaagatcaaattaaatcgggcaatggaaacctcctctggaggctgtgcagtagagtgtgacacctcctaatttcatgacttgggcagattgcttcattttcctactgtaaaaaaaaggaaaacgataataacaggtaatgtttattgaactcctacatggaataagtattttatacacagatccatttcaccctctgaatctaatgaggtagtataattattatctccgttttatagatgagtggaggctcagatcacccagctagaaaatggagatagaatataattctagatcaggggttagcaatgaccgcctgagggccaaattctgctcagtatgtgtttttgtaaataaagttttattggaacctagacttatttgcttatatatggcctgtggctgtttttcagctgtaatagcagacactgtatgacccatgaaacccaaaaatttactctttacaaaaacctttacagatttttgatctagattatcctagcccgtgctcttaatctcacatatgtcctgctccaaaaataccttttttttttttttttttgaggtgatgtctccctctgtagcccaggccggagtgcagtggtgtgatcttagctcactgcatctccacctcccaggttcaagccattcttgtgcctcagcctcccaagtagctgggactacaggcctgtaccaccacgcccggctaatttttgtctttttggtagagatggggtttctccatgttggccaggctggtctcgaactcctgacctcaagtgatccaccagccgcggcctcccacagtgctgggattacaggtgtgagccaccacgcctggctagaaaaatgcctcattttaaaaatgtgatgctgaccaggaaaaacaaaactaaaatgtcaaaagtaataatagttattagataactgaatctattaggggtccaggaaaattaaaaacaaaacaaagtttttaaaatttgtgttccccctttctcctttttttccgccaaaacttgaaaatgtttatatcctgaatttacaacaaaggaaaaaccttttctgcctcatcagctttattgaaactacatataaatgcttatctaaaaaccaaaagtatatgctagggaaatttccaaaataatgaaaaaaatggttttccagaagacaaacattatttttcatatatattattttatttatttatttattccgataagcattttgcacttatttatttatttattgacacagggtctcactctgttgcccaggctggagtgcagtggcaaaatcatggctcactacagcctcgacctcctgggcttaagtgatcctcctgcctcagcctctggagtagctgggactacagacatgcacatcaccccacctcacatatatgttattggcaaaattgcaagtagaatacattgttaaagtaagaagcttccatgtttgaatgtgatatttacagataggtaaactggggattggctcttggaaattgattcgtgttgccatgtgagctaaattgctgttttcagtgttctaatatggcttaatttttcatgggtttccaggatcgatgaatgtagccacataacatatccaggttttaaaaatgttagtgaacaagattaataatagtatcttctgtctgggcacactggctcacgcctgtaatcctagcactttggcggctgagatgggaggatttcttgaggccaggagttcgagaccagcctggtcaatagagtgagactccttctctatttataaaaagaaaatttaaggccgggcatggtggctcacacctattatcccagcactttgggaggccggggcaggcagatcacttgaggtcaggagtttgagaccagcctggccaacatggcaaaacctgtctctactaaaatataaaaattagctgggcatggggtggcacatgcctgtgatcccagctacttgggaggttgaggcgggagaatcgcttgaacccaggtggtggaggttgcagtgagccaagatcgtgccattgcactccagcctgggcgacaagagtgagactctgtctcgaaaataaaaaataaaatataaaatataaaaataaaaataaataatatcttctgtgtttccaaaattccaggccccttgctctgagttctgaatattctatgccaagccttcctgataactctataaggcagatgtcattttcattttctagataagaacgaggcccaggtacaccaggtgcctcatctaatacatggctgaatgacctcaaatcccatactttttttttcctctaagaggaggcctgtgttcgattgttcgtcttttcattcaggcaaattcttacctacttcagagcataccaggtgccaggcactgccctgtgttctgggaatccgggagtgaacaagacagatagtaactcagttgtagtcaatgaacaggatattttcaggtgaagaggaggaatgctaggaaggaaacgacacgggatagaagagacagaaagtgatcaaagttgggtgcagcaataggggccgcagaggctaaggaagaggcttgaatgatgaacgcaagccacgaggtgaagatctagacccctgaagagagttccaggcagaggaaacagcaaagcctccctccctccctccctccctcccttccctccctccctctctccctccctctctctctccctcccccttcccgcctgcctgcctgcctttcttccttcctttttttgagacaggatctctctctgtcacccaggtgggaatacagtggcgcgatcatggctcactgcatcctcaatctcccaggctcaggtgatcctcccacctcagcctcccaagtagctgggactacaggcacgtgccaccattccccactactttttgtatttttttgtagagatgagtttttgccatgttgcccatgctggagccacatttcttgaagtgggagacatcgtggtatgttgagaaaatatgttgattctttatgacttttcccaattcaggagtcacttaacccttgtccaagcttgagggtcttaggtgctgctttctttttttatttttaaactttctattattgttatttttgagacagtcttgctctgtcgcccaggctggagtgcagtggcgcgatctcagctcacggcaaactctacctcccgggttcaagtgattctcagcttccctgagtacctgggactacaggcatgcgttaggtgctgctttctaagtgccaaggttacctgagggtttgtcctcaggtctatgaaatgtggctctgatttcctaacatctttctttctctttccctttgtcagacaggggagcaaggtgttcctcattcatttgtgattggaaacagtaagttaccagtcactgagtacatgctgtgtattgtgctaactgcttagttgtattaccttatttaatctgcaaacaacccaatggaatattgtggaatagtagtcttaaaacagaagcatgccccctctatcttcctttctccgccatcgtggtgtgcgcttgactctgcttcttgccatgtcttctcacaagactttcaggattaagcgattcctgccaagaaacaaaagcaggctgggcgcagtggctcacgcctgtaatcccaacactttgggagactgaggtgggtggatcatggggtcaggagttcaagaccagcctggccaatatggtgaaaccctgtctctactaaaaatacaaaaattagctgggcatggtggtgcatgcctgtaatcccagctacttggaggctaaggcaggatagttgcttgaaccgggacccgggaggtggaggttgcagtgagtcgagattgcgccactgcactccagcctgggctacagagcaagactccgtctcaaaaaaaaaaaaaaggaacaaaagcgaaatcgttccaatccccagtggattcagatgaaaactggtaataaaatcaggtacaggtcaggcatggtggctcacgtctgtaatctgaggtcaggagttcaagaccagcctggccaacatggtgaaccctcatctctactaaaaatacaaaaaaatggccaggcatgatggctcacacctgtaatcccagcactttgggagaccaagtcgggtggatcacaaggtcaagagattgagaccatcctggccaacatggtgaaaccccatctctactaaaaatacaaaaattagccgggtgtggtggcacgtgcctgtaatctcagctactcaggaggctgaggcaggagaatagcttgaacccgggaggcggaggttgtggtaagccgggattacgccactgcactccagcctggcaacagagtgagactccatctcaaaaacaaacaaacaaacaaacaaacaaacaaaaaaattagccaggtatggtggcatgctcctgtaatcccagctactcgggaggctgaggcaggagaatcacttgaacccagagggtggatgttgcagtgagccgagatcgcgccattgcactctggcctgggctacaagagtgagactctgcttcaaaaaaaaaaaaatcaggtacaactctgaaaggtgacattggagaagaaccttatagacattgggtctataaggaattgcacacgagatagcatatatttatgctgtatcaaggtcatgatgatcttaccatatcaagctgaaaatgtcaccactatttgaaccatcggacatgttttattgggaatgtattttttctgtttgtatgctctgagctagcaggctgggttcagtaataaatatgtgagaaattttgtttgaaaaaaacaaaaaacaggagcatgctgtactgatttaagaggattaatttctagaatctacatgttcatgcttatatttacttattccgattccatgtgggtctgggtgggacacgaggatctgcatttttaactagcttttgggggatgccaatgcttctgttttatagaacacactttgattagcatcattctataccagaagttgacaaactttctctataaagggccaaatagttaatattttcagttttgtaggccctgaaatctttgttacaagtactcaattctgctattgcagcaggcagaaacatgtaaatggatggatgtggctgtgttctaataaaactttatgtattttttattttttgttgagacggagtctcgctctgtggcccaggctgcagtgcagtggcgcaatcacagctcactgcaagctccgcctcccaggttgactccattctcctgcctcagcctcccgagtagctgggactacaggcgcccgccagcatgtctggctaatttttttgtatttttagtacagacggggtttcatcttgttagccaggatggtctcgatctcctaacctcgtgatccgcccgacttggcctcccaaagtgctggaattacaggcgtgagccaccgcacccggccaaaaactttatttataaaaacagatggtgggccagattccttgcagttgcagtttgctgactcttggcttagaccaatcatggttcatctcctggactcatctcctctgaatatattgctgactaaaggctgaaccagtagggattctcctagtcaaggaagacataggtgaggattcctgagaagcatgtcaattcctgtgatctaagccattggcatggagcaattcttaggttatttttggtggaggtaagtgttagtgattcccccacaacctagctacagtttatcataaaatcaaatcttggctgggcgcggtggctcacgcctgtaatcctagcactttgggaggccgaggtgggtggatcacgaggtcagcatttcgagaccagcctggccaacatagtgaaacctcttctccactaaaattacaaaaattagccaggcttggtggcgggcacctgtaatcccagctacttgggaggctgagacaggagaatggcttgaacccaggaggcggaggttgcagtgagccgagaccacaccattgcactccagcctgggtgacagagtaagattccgtctcaaaaactcaatcaatcattcaatcaaatgtcagtccaaattctgctactctttttgtttttttctttttttttttttgaaacaagagtttcgctcttgttacccaggctggagtgcaatggagtgatcttggctcactgcaatctccccctaccaggttcaagagattctcctgcctcagcctcccaagtagctgggattacaggcacccaccaccacgcctggctaatttttgtacttttagtagagatggggtttcaccatattggccaggctggtctcgaactccagacctcagatgatacacctacctcggcctcccaaagtgctgggattacaggagtgagccactgcgcccggcccaaattctactactcttatagccaaatatttattagcaaagcaggcacaaaacagttcatacaacctgttctgaaaggttgttgacaaagtcccagcattttgttctttttttcctttattattatctttattattaaatttaatttagtttttggctggaatcaaatgactggtatattattattttcaattgacacataatagtgatacatattcatggggtacagcgtgacatttcactacatgtatacaatgtgtaataatcaaatcgggataatcagcatagccatcacctctaacattcataatttcctcgtgttgtgaacattcagaatccactcttgtagctatttgaaaatataaaataaattgttgttaatgatagtcatcctatgtaccctatacagcctagcactccgttcttataggtgctctggtcacaccctgcaggaagggtgtattcaaagcaggcataacaacattccaaaagctgggccctgtgctctctggcctgtatgaggcaatcagaaattctcttaaaccagtgactggaacagaatcagttagtgaatgaggcagggaagggtataggtgaagggtaaagggttgcatcctgtatcacattctagtcaatctacttgtcctgagtaccttaattccaccaatgaaaatccatttgtaatatcgtcatgcaaattaactagtcactagtttcaccaatagaaaccctattcctgaactgcaggaagcactcgcaatacctgtggccggagtgtggacctttctaacattgtgcttgcgaaccatcctgaacaacatattcttcattgctgattagctgacccctcttattatacagccaagcttagactcactgtatggatagtttagctcgctgattaattacactgaagtatgttcaagtaaagtacagatctggtaaccaactatgtctactacagggcttgtggcaaggatagggatgatgtggttaaaatcctggcagacagtgggcacttatttaaaaaaaaagagaggaataaagagtgctatgactgctgttcagagaacttgtcagaagtaaagtaataccagtctgcgtgtgtgtgtgcgtgtgtgtgtgcatgtgtgtctgtgtgtgtgcgcatctgtgtgtgtgagtgtgtgtgtgtgtgtgtgtgtgtgctctcagccatatggcttcctgtgctttctgtgcttttctgattttacaaggtagaggtacagacaagaaaaaggaggcactgattggataagagctgggttcaaatctagtttgttgctcactagctgtgtaagtttgtcagttgctaggtaagttgttaaaactttacaagcagtggtgtagcacagctcaaagtagaaaatagtgctgttggttttcccctctgcagttgtcaagaaggggcctcatatgcaacatggggataatgatggtgatgattaagtaagaaggcgtgtgagacagagtctactgcctgcacacagcaagctcttggtaaatgttgtctgccattatcctcatcccgatttcgcagatcaaggcttacagagcttaagtgatgctctcaaagacagaggcagagcctgggaaaataacagctacacaacagtgccacccacaccaaaataatatattccaggggtatggtgaatcttttacctaaggcttttctagaaattaaggacacctatcagtgatttgagtcttacatttaaatgacaacgttgaaaaagtatttaaacagggtctttggccagtgtaggctgcattagatttaaaaaaaaaaacagttatccaagttcttgcttttctgtgtccagaaagttctgagattaggggtctttatcaactgtagggggcacttatccttggtctcccatctgaacctgcttgttaaacttggggagtttctcccctgttattcttggtaggaagcagtattggtttttcaccacagaaactgaaaatgtcaaaaattgatttccagtcctcctgagggatttagggtcacccaaatcctgtatgatatcatcttactcaattacatctgcaaaaatcctatgtccaagaaggtaccattctgaggttctgggcagacatgaattttgggagtagcagggagactctattcggctctctacgcctactaataatctttatttatttttatttttttgagatagagtcttgcgctgtcacccaggctggagtacagtagtgcgatctcagctcactatagcctccacctcccggtttcaaacaattctcctgcctcagcctctcgagtagctgggattataggcagccgtcaccacacctggctaatttttatatttttagtagagacagggtttcgccatgtttaatgtgagaaatatttcatgcctgtaatcccagcacggcctatatttctcacatttaatgcgacctttgtatgtttctttccttttttttttcctttgagatggagtcttgctcttgtcacccaggctcgagtgcaatggcacgatctcagctcactgcaacctctgcctccctgattcaagcgattctcctgcctcagcctcccaagtagctgggattataggcgcccaccaccacgcccagctaatttttgtatttttaatagagatggggcttcaccatgttggccaggctggtctcgaactcctgatcttgtgatctgcccgccttggcctcccaaagtgctgggattacaggcgtgagccagtgcgcctggccagatctttgtatgtttctttgtggatatattgatgtatcagatggtacagggagtgctgccccgaccccgctggaggtgcaatgtaatatcagatataggcaccgcattacatttctaaaatataaaaagtgtagaattccaaagtgtattgggctataagggtttggataataaatttggatgtatattttacgtcattttaaagctgaggaatagagacactaaataccagcgccggtgagtgacagtgcctggactggaatccagggatcggagttctgagttgagtctctaaccactaggctctcttaagagaggtagactgatgcttattaactgcatgaacgaaggagtaaaggaggctgactgggccttgttccaattcctgggctgttttgcctgctgctagggagattcctatctttctctggcagaacatctttctaagccccgtgctgcagctgtaagtgtgcgtgcgaaacatgcatggacacacaccacacacacacagactcacaccttggagaggagctgcatgctgttatatttcctggagctttgtggctgcctgttgtttcagcgatctcatctttatgaatgaggcgacagaacccactagtaaccaggcgagggagtgaaaacagatgcttttccagccaggcagggctgtgctgagcagtttgtcactggttaaacctctgtctccatcaagacacactccctgtaaaaaatgattaccgttctctctctctgactttaggaactgctccggtcctgaaaactcaaagtcacagctaacaggaaaaggataatttgtctgttggatacttagaccagaataaggcaatggggtacagtgatgctatttctgaaagtgtgaaggcctaatttcctccagccaagagaggaagtgagcctgctttgcgtgcttgaaagcttccttgagaggaggtgaggttgcctctagaaggcagtggaaaatcaacgtggttttaagtgagcaaaagtcttcaaaaaagcctcaggaataagataggctataggtttggccaaggacagaccatcaagcaatattgttgattgaaacacagttgtagaaaggtgaatactgtatgatttcctctacgtttaaaaaaaggacatgtatctgcacgtgtgtgtgtgtgtttagatgtgtaaaaatatttaaaaaaggacgagaagaatactctcttaccattaacacaggaagtaaataaaaaatggggtgggggtggggaaagccatgtcagagggagagaagggtgagtttctattttcagtcatatatactacagtgtttttcctttacttctgtaatctaaaataaaaataaataaagtcaactggcaaaagcaaacacccaagcaaacaactacataataaacagaaagccctttaatttctaagaatcaggaggcttcagaacatgaaagaacttcctggttcgaggcattcctcgtgaaatcatgtttggaagccaatctggaattctaccccgcccggaacgaggtagactccataaagcagtattgaaatttccctgttgaacaaaaaataaatgtttgatgctttctctcgacctctgtttaaagttattaactcttcttttatttaacttttattaaagttattaactcttctttcagcttactgctgtggtggtgtgtgtgtgtgtgtgtgtgtgtatgtgtgtatgtgtatttaaagcataggaaacatccaaatgactaatgttgtttacattctattctttaaaatacacatcatactagatgaaagcataaaacaatatctttaaatattaaagaaaaacaatcctgtttaaaaaccagcctcttccagagcctaagagagatacactaggcccttgaggatgcttgagactgtgcgcaaaaaaattggggtctttggttactctattgtaaaacaatcaggttgcattctggcttttagattgttttaagtgaagtttcactacttgcttgttacttttgtttaacttattccttataaattgggttaagtagaaaataggaagagaaagaggagcccaaggaaggtggtgatggtaggtaaagctgggaacaggcaccccccttctgcctcatctccacttgcagggacaccagtaattcaacaaatggtggctgccggcaacacctccggttgagaagctttcctggttatgaacctgaaacaggcttttcttaggagaagagcatacttaattactggaatctcaatcacatgcgctgaaagaataaatgaccagcatgggcagattttgattaagacttgtcaagggggaaatgattttcttaagtttgggatttttaactttataagatagtcttcttgttggcaaaattcgtcagtgtctctggggctttcaggctacaggattgtgttagaaacagtctgtgtgccatcaccttttagaatatgtccatattaaatgaggctcaaacaaaaaacattttgtttctatatatcaaataaaataaagaaaaggtcctttgaaagcttgatcgaaacgttaggttttgttactgtccttttcaaagcactattatcatattatttcttattcgattctcttagcaacccgggaggttgtcagagtaaacaatcttcgtgttatagatgcgggagaaaatgcataaaaggctaactcatgcatgtaaacaattggtcagagagtttaggattcctagtctgttttactcaacctttcagtgagggcgagtatagttcctagcaggttgtattcaagcatctcctccaggattcatcttgtactaaaagttatggaaaaaatctcgataagctcaataaaatatccagagaggaggcttacttaagcacaatgcaccccaaatccttacttaagacttttgggaagggattcattttgcctttgtcatcaggtacgtgccagaagcatttgtaagtcttgccaggaacttgactatttttgctttgtttattacctgagctggttgtgcagctgttggtcttagagaaccgtactagatccctgcgagtgggtggcaatgtgattctgcagacacagataataattctagacaatcgtaggctccgtttattccagggatgtgcccttcatttacagaaagaagcctgaatcagagaatggaaaacaactatgacacagcacagcaggaaacaaaagaacgggattggttcttattccccccacccccgccccaccctgcttaacttttagactacgttgtcttaaatgtagactttgatctaaatgttgagtcccttttcattacaacagtaattcaaaaggcagaatctagatatgccttttgatgatctgttggtctttgcttaagggaaaacaaataaaagtaacctgggccaaatgcaaaacatgcaaattaggaattctgtctctctctctctctctctctctctctctctctgtgtgtgtgtgtgtgtgtgtgtgtgtgtgtgtctgtgtgtagcaaataatgggtttctagcatgtgcaaaagtgatgtaaaaataacaacaataataataatcacagctcacatatatgtcaggcactattttaggtgctttacattgctttacaagtattaattcatttagtgctcacatcagccctatgaggtagatgctgttattatcctcaccttatagttgggaaaactgaggcatagaggggtgaagaaacttattgaagtctggtaaggaagaaaaactcagtcgccatccttgccttggtgatacatgcaaacatacccttaggcatggattcattccattttaagctggctgccaccaacacaaacccatttgagaactctgtgctaattagaaaaagaggatctccctccacagcccagggcaggagctgcctttttgggttgatggcgttgaaggggatcttcaagagctctgcgtggcaagcggaggcagggctaaaatgcaatggactcctttctgttggctgggagccctggtgtggggccatacttcctgtttgtggtgatgctgtggctcccacacacactagttgtgagactttggggaggatcctcaatgtctttgagtctctgtgtctccatctaaaaaactggcatgatgctgctgagctcacacaaaggcttgtgatgaggattaaaggttgaattgtatatgaagtacttggtacacaggaagcaccaagaaggcaaaattaagcatgtgatagaaccaggccagagtttttggactgggtcataaactccttcatgggagtttattggggggcagagtagccattggagactcattaaaaaataccatggactacatatcccagaaaaggcaccggggtttttttagcaatggattatgtcttcactcagtttttagcatggaaagatgctggtgcttgaataaactgtaccattaagctatgtccttaataaactatctttctcgaattatggtcttgagagccacgtattgaaataaacagagtggataccactaaactggggaattgctttcagaatgcctcacttgagtctaaatgggcttacagatattctatgtgacgttaatatgccagtgggaagtcacatgccccacatgtgcaatgaagaattgccatttaaagttgtgtgactgtggacacatttcttttcttttcttttttttttttgagacagagtctcactctgtcgcccaggctggaatgcagtggtgtgatcttggctcactacaacctccgcctcctgggttcaagtgattctcctgcctcagtctcccaagtagctggaattacaggtgcacgccaccacgcccggctattttgtatttttagtagagatgaggtttctccatgttggccaggctggtctcgaactcctgacctcaagacatccacccacctcggcctcccaaagtgctggaattacaggcgtgagccactgcactcagccacatttctttttttgagaccagggtcttgctctgtcacccaggctggagtgcagtggcacaatcatggctcactacagcctcaacctcctgtgctcaaatcatcctcccaccttagcctcccaagcagctgggaccacaggcatatgccaccacacccgaataatttttatatttttttgtagagacagggttttaccatgttgcccaggctggtctcaaactgggctcaagggatctgcccgtctttgcctcccaaagtgttgagattacaggcgtgagccaccattcctggcctggacacatttcttagctatgctctgcattagctttctcatctgtaaaatgggataataacagtttctccttcgtgggcttgtgaggcttacataagaaagatccatgtgaaatgtgtggcaccattaatggcaaataataagtgctcaaaaaatgccagctagcttagttaattgattattattattaaatggtatataaacctaaaggcaatattgtcattttcagattctcttaaattcctaagtttaaccccacaggaaactatactcagtagacacacagtaatttgttggcctgtgttgtttctcctgccttctttgaggatgcagtattttttcttctaccactagatgagtgtaaagttttgttgcagacttgtacatcagtgtctgtcactaggaagaagctccagggcagaagatcagttggcatctttaattgcttaaattactgggactgaagctcttggacgcccaaaagccaaggaggaattttcctgcttgtcttagcatttggcttggctttgctttttccgcgtgcatcaaaggccaagatctagtttgaatgtggaaagttgatgacagtcaataaaaggatttctctcccccgctgcttatttggtgagttaaatgcttaggtgatgcatctccagtatatacctttctatatggtgaatgagttttccccctgagtcctggagagctggctggattagcaaaggtcactttcagctttgctgaggtagaacacccacgcccctctatgtagcacatactcctgggtgcctccctgcgggttagattgccttggctgcctgtagcaaaaactaccaaatggtgggttattaaataggattttatttattttttccttgtaatatgtagtcttagcttgcagggctattggggcattttaaggaagttatcaaggacccaaactcctcccttccagcttcactatcctttgtgtattgctctccacctaatggttttgttttttttaaaaaaatgtgattatcagccgggcatggtggctcacgcctgtaatcctagcactttgggaggccgaggtgggcagatcacaaggtcaggagttcaagaccagcctggccaacatggtgaaaccccgtctgtactaaaaatacaaaaaaaattagccaggcatggtggcgggcacctataattccagcaattcaggaggctgagatggagaattgcttgaacctgggaggcagagattgcagtgagctgagatggcaccattgcactccagcgtgggcaacagagcgagactgtctcaaaaaataaaataaaataaaataaaatattaaaaaaataagattatctttaacttcttttttttttgacagagtcttgctctgtcgcccaggctagagtgcagtggcgcaatcttggcttactgcaacctccacctcccaggttcaagcaattctcctgccttggcctcctgagtagctgggattacaggcatgcatcagcacgctcagctaatttttctatttttagtagagacggggttttaccacgttggccaggctggtctcaaactcctgacctcaggtcatctgcccgcctcggcttcccaaagtgctgggatcacaggtgtgagccaccgcgcccggccttaagtttgttttcaaagtgcgtttcaaacttaaataaacccaggctcagcaatgaaaggattcaggttattacattctgattgtccagggagcaggcagtgcggctggctccccgggagaatgctggatcgttcattcagcgagtgcgcatgcctagaagacgatctgccagctgcacagacacgctgccacttgctgtgcgttcatctccgtcagcgcatagagaccgggagccacctcctgactgaggcaccagactctctccgacctttcaagatgacctgctaaaataccatcttgaggattttctactgagattccatagaacctttctatttcagttcccccaggctctactgggagtattatgatcatccttgatgaaaggaagggcagcattttaattccttccttccttcaacaaaacatgattgggcacctactgcatgccaggaactgtgctccacagtgcctgtctcagggcaatccctttctagtaggggagctcatcaaatactaatacgtagaaaaattaactgatttgtaaaccaatgcaggatagaatagaatagttgatgtatttatttaattacagttaacaaaataatagtatttattaatacatggcaactcttatgtagtacttattacatgctgggtggtgtcctcagcagttaatatattaattcattttatgctttcctattttgcaaatgagggaactaggaaaccaaaaggttaagagcatatatatatatacttttttttttagacgaagtctcactctgtcactcaggctggagtacagtggtgtgacctcagctcactgcaacctccgcctccaaggttcaagtgattctcctgcctcaacctcctgagtagctgggattacaggtgcctgccaccattcctggctaatttttgtatttttagtagagatggggtttcaccatcttggccaggctggtcttgaactcctgacctcaagtgatctgcctgcctcggcctccagaagtactgggattacaggcatgagccaccatgcctggccaggttaagtatattttaaaagtcccacagctggtgaagtgcccggtgaatatgaaggtcagccattcggatttgagagtccccctggtaaccacacagcacttctgtgcatgctctttaccgatctcccataaaaggtggacgagacaatgcagagaactgacagattccacaaaggaacaaaaggtgggtagtgatgtggatcgggactgctggactggtagggaccactttattggggctgcctgagcagagaccctaaggatgagaagcgaccagcaatctgggaaatggccctttccacagagagaacagcaaatgcaggaaccccaggcagggaagagcctggcacatttcagggacagagagaagactgcgtgaccagggcaagctgtgccatggagaccgagggtcagaaacgtaggagggatatccaatatgacttcaattcaaattccattcaaaaaagaaaattcctcaccatctgctcagggttttgcagggggcttgaagtggctggcatttgtcatagagctcaagaatatgtagaaatcgtttgttttgttttgttttgttttttgagatggagtctcattctgtcgcccaggctggagcgcaatggtgcaatctcggctcactgcaagctccgcctcccggggtcacgccattctcctgcctcagcctcccgagtagctgggactgcagtcgcccgccaccacgcccggctaatttttttgtgtttttagtagagacgaggtttcaccatgttggccaggatggccttgatctcttgactttgtaattcacccgtctcggcctcccaaagtgctgggattacaggcgtgagccactgcaactggccggttttttttttttttttttttttgagacggagtctcgctgtcgcacaggctggagggcagtggcgcgatctcggctcacggcaggttccgccccccggggttcacgcctttctcctgcctcagcctcccgagtagctgggactacaggcgctcgccacctcgcccggctaattttttgtatttttaatagaaacggggtttcaccgtgttagccaggatggtctcgatctcctacctcgtgatccacccgcctcggcctcccaaaatgctgggattacaggcatgagccaccgctcccggccaactggccattttttgttgttgttgtatttcagcagagtcacagtttttttttttttttttttttttagtagagacagggtctcaccatgttgcccagggtggtctcgaactcctgaactcaggcaatctgccctcctcagcctcccaaagtgctaggattacaggagtgagccaccgtgcccggccaagaatatgtagaaatcttgaacatcattccgtgtcatttgaaagcctttaagcatttcagaatctttgcttccttagtaagtgtccaaacataattgagtatctctgtaatgattggtggtctgaccagagcaacagctctgggtccaatgacgcaggttgagttccgtgaacttgcagcagtttgagctgcacttatgtgaacctcaagacttccccaaagtggagtttctttggttgtggtttaaaaataaattttaaatattaggttattttcttgtgatttacattatttctaaaaatggggcacaaggccaaaaataagaaagagaagaaggtaggctttgtataacctgtttccagtgaatcgagatttcactgtcatttgtatttgcctccacagaggagactcttggaggaaccatggatttggcaggtaaataaaagggtcgagttgagggaaaatattcatagcccagtcaaatattttgcaacaaaaatgaatgcaatggcaccacttggaattgatacattcgcttcatagtctgagcagaacaatcgtagcacattggcaaacctgatagttaaggcatattggactccaattgctcactgttaggggcaagggaagcccatttgattgctttttttttttttttttttttaggtggagtctcactctgttgcccaggctggagtgcagtggcgtgatcttggctcactgcaacctctgccgcctgggttcaagcaattctcctgcctcagcctcccgagtagctgggattacaggctcctgccactgtgcccagctaatttttgtatttttagtagagacggggtttcaccatcttggccaggctggttttgaactcctgaccttgtgatccacctgcctcgtcctcccaaagtgctaggattacaggcgtgagccactgtgccgggccttgattgctttttaaaggcaaacactcagagcttttcacagaatattaatgaagaggagaaatgaagagttcaggcaccctgggttagaatccccaaattcctaattccttgaagtgtgatattaatgtccctgagcctcaacttcctcatctgtaaaatgtgcataaaaacagtacctactggctgggcatggtggctcacggctgtaatcccagtactttgggaggtcgaggcgggtggatcatctgaggtcaggagttcaagactagcctggccaagatggtgaaaccccgtctctactaaaaatacaaaaattagctgggcatagtagcaggcgcctgtaatcctactcaggaggctgaggcagagaatcacttgaacctgggagtcagaagtttgcagtgagctgagatcatgccactgcactccagcctggatgacagagtgagactgtctcaaaaaaaaaaaaaaaaaaaaaaaaaagtacctactttgcagggctgtcttgaggataatgattacattgatgtaaagaagttagttcagggcctggtgtgagtaaagcctcagttaacacttctatttgcttctgttcccatcatatccttcccagcccttagtctgtgaccccagtgctactatactatggcacatcattgggtggcctcagaaggcagtaggatgaatatcactaggcccatagtgtggcagagaaggaagacatcacactgtgcccttacagagaagttgcttcttttttgtttttgagatgcagtcttgctctgttgcccaggctagagtgtagtagcgcgatcttggctcactgcaacctccgcctcccgggttcaagcaattctcctgcctcagcctctggagtagctgggatccaccacgcccagctaatttttgtatttttagtagagacagggtttcaccatattggccaggctggtctcgaactcctgactttgtgatctgcctacctcggcctcccaaagtgctgggattacaggcgtgagccaccgcacccggccgagaaccttctccttacaaggagcttttgctctatggcagggtttctattatattcaaattctgggagaggccatcctttgttgaggggccatcctgtgcactgtaggatgttaaacagcttctctggcctctgctcattacatactagtaacacgtaccccatgttccaggaggcgacagaaaaacatgcctttgacctttgcccagtgtttctctcaaggcaaactcacccctgggtgagaatctctggtttatagacatgtgcctgaatgggaaaatgggtcaaatgttagtgcccacctttgtcctttttttttttttttccctgacagggtctcactctgttgtccagggtggagtgcagtggtgcaatcataactccctgcagtctcgaactcctggcctcaagtgatcccccctcctcagcctcctgagtagccgggactacatgcaccaccaagcgtgtctaattttattttatttttttgagacggagtcttgctctgttgccaggctagagtgcagtggcgtgatctcggctcaccgcaacctccgcctcctgggttcaagcaattcccctgcctcagccttccgagtagcaaggactacaggcatgtagtccaggcacgctaattttttgtattttagtagagagggggtttcatcatgttggccaggatggtcttgatctcctgaccttgtgatctgcccgctttggcctcccaaagtgctgggattacaggtgtgagacaccgcaccctgccccatgcgtggctaattttaaagaattttttgaagagacgggatcttgctctggctggcctctaattcctgatctcaagtgagtctcccgtcttggcctcccaaagtgctgagattacaggggtgagccaccatgccctgcctcaaactcttcaaaaatatatgcttggtcaacctttgagattcttttagagtgttcaggattggagaagagatatgcatctttactgatgggaaaactttatttgtttatttatttatttatttatttttgagacagagtctcactctgtctgccctggctggagtgcagtggcgcgatctcggctcattgcaacctcctcctccagggttcaagtgattctcttgcctcagcctaccgagtagttgggactacaggagtgtgtcaccacgcccagctaattttagtagagacagggtttcaccatgatggccaggctggtcttgaactcctgacctcaaatgatcctcccgccttggcctcccaaagtgctgggattacaggcatgagccactgtgcctggctatttttttttgaatattgaacttgattctcataaagtattgctaccttcatgatgctgtaggagctggctctttcttgagggtaagccacaatctcatccaccacaggttagctacattggctgctttctgattctcaaacacaagcccttgtctacctcaagaccttggcacttactgtccctgtgtctggaatgtcacctctgcagactacctgttactgcctgacctccttgaatttctgtacctacatgattttttcaggaaggacctcctctaccccctctccacccctagttattctctttttcacgatctggttttattcttcatagcactcacccaaacccaatttattgttattttttagattgtatattgcctacctgcccctaaaaacataaccttcttgtcaaacatgttcatctgtgtatccgcagtgccctagcccaatatcttgcctacaatcggtgccaaataagtagtctctgaatttgctgttgacttggtgaatttataaacaggtaatcaacatttggttgcagtcatctttgatttgtaggcaactgaattttatttccaattgccaaaagttgtctttatttgggatgacagcaccaaaacctttgctgtcttgtgcaccatgaatatgaagccgagatgtcaggtgataccagataaagaatacgtcatggcagctctttaaacatgtaaacatattaaacattcagggcatcagcccctggctcgtggagaattccatcctttagcacatgacaagttggggtttacagtcaaagtccacttagcaaatgtttgttctacaacgtgctttccttttgtttcctgtaagtatggcttcatgccctgccaggatctgaggtcatagaaacacgaggagacgattaacatatcaatggaggggtctctttggaatccagaatttggaatgatatttgcatcttgagctcagaagccgtgcaggcgagcctgcttattgattgcctttaatttccccttaaaacagtgtctttttctgaagaaaagattaatagaggagggctcagtttgtcgcgtgatttatgctcaagtcctgcctcctttgcattcagaagcgcattgcaagctcgtccccacccctgagatgtttggattcagtttctcaagaaaaatagctgctggtcaccaaagcttacagcttaattgaatttgtctttgtccacttaatcttcatgcttacaaaaagtgggggtgggaggatttatacagaagagatgtacctaaaatatacacgcgatcattaggagggtgggctgaagaaagagatataaaatgaaaatgagggtgccacttagtctatgctgcacttctctttgcttaaggcattgataaatacactagtatctccccagtataaacatgagaacctaagaagtaaattgtattgtaccaactctgagctgttccatcatttttgttttggctaaaaatttgttttttttctttgagggaagaaaaagacacaaaaggaaagtgaagatttctgtgttacataaagtttgggacctctttctataaataaatagctggctatattctgtgtcactaataatcataacactaatagtagcaatcaatttatcaagcacttttttttttagccattgcactaaatgctttataatttttttttttttttttttgagacggagtcttgctctgtcgtccaggctggagtgcagtagcgggatctcggctcactgcgagctctgcctctcgggttcatgctgttctcctgcctcagcctcccgagtagctgggactacaggcgccctccaccacgcccagctaattttttatacggggtttcactgtgttagccaggatggtctcaatctcttgacctcgtgatccgcccgcctcggcctcccaaagtgctgggattacaggcgtgagccaccgcgcccggactttttttttttgagacagagttttcgctcttgtcacccaggctagagtgcaatggcacgatctcggttcactgcaacctccacctcctgggttcaagcaattctcctgcctcagcctcccaagtagctgggattacaggcacccaccaccatgcctggctaatttttgtatttttagtagagatgaggtttcaccacgttggccaagctggtctcaaactcctgacctcaggtgatctgcctgcctcggcttcccaaagtgctgggattacaggcttgagccactgcacccggccagggctttataatctttatcttatttaaacttgactccaactttttttttttttttttgagaccgagtctcgctcagtcgcccaggctggaatgcagtggtgggatgtcagctcactacaacctccgcctcctgggttcaagcaattccttgcctcggcctcccgagtagctgagattacaggcgcccaccaccacacccagttaatttttgtattttttttttttttttttttttagtagagacagggtctcaccatgttggccaggctggtctcaaactcctgacttcagatgatcctcccacctcagcctcccaaagtgctggaattacaggcatgaaccagcatgcctggcttttttttttttttttcttgagagacagggtctcattctgttgcccaggctggagtgcagtggtgcaatcttggctaactgcaccctccacttcccagctcaagtgattctcctgcatcagcctcccgagcagctgggattacaggttctcaccaccatacccagctaatttttgtatttttagcagagacaggtttcaccatgttggccaggctggtctcgaactctgatctcaagtgatctgcccgtcttggcctcccaaagtgctgggattacaggtgtgagccaccatgcccggttgactccagaattctgaaagaggccctattatgttattcccatacacacaaggcttagagaagtaaaggaagctgccgaagtttgtcccgtggcagacccagattttgaagctgggcgtattagacttgaaaatcgaagactgcagtcctaccaagagaaggacgttcatttggatttgcttctgtctacatttatttctccagcatggtggatggaggaggcatgaacttcccagttactcagccttgagcttcttgtcttaagtctgcctccaagacttaaccagcgggccgtatcatctaccatggccaagtaagattactgcagactgtgctcttcaaatctgtagccttttgttattctacacggtcacttttagtctgacttaagatgcttgagtgacacaaggagcagagagggaagctaggtcggtaagaatctaagtgtgaccccgatgcaccataagatcccccctcgtgccaaccaacaagattaacatccaaggtactaataaatggaacggcaccccccaaggtgtaactccttgagaagttaacaattatatttttatcctaagtaaacccaatgatgctgggcgaggtggctcatgcctgtaatcccagcactttgggaggctgaggcgggcagatcacgaggtcaggagttcgagaccagcctggccaacatagtgaaacctcgtctctactaaaaatacaacaaattagccgggcgtggtggtgggcacctgtaatcccagctactcaggaggctgaggcaggagagttgcttgaacccgggaggtggaggttgcagtcagccgagattgcgccattgcactccagcccaggcgagagtgtgagactccatctcaaaaaaataaatgaataaataaataaataaaataaaataaacccaatggtgctgaaggttggaagctgagtgtgtgggaagtaaccatttgagtgtttccgagtttctttctttgatggcggacatagcgatggactgaatgtttgttttccctccaaattcatctgttgaaatcttaatccctaatgtgttggtatttgaaggtggggatctttgggaggtggtgaggtcatgagagtggagccctcatgcgtgggattagtgcccttataaaggcaatcccagggaactttccctttctgccacgttggcagtctgcagcctggaagccggctgtcaccagagcctgatggtagtacccagaggtcagtgggagtcagagatcaggataccagatgctgacattctgttctctgacttccagcttctagaactgggagaaatcaatgtctgttgctctaagctacccagtctatggtattttgttacggtagcccaaagggactaagacagacatgtagaatgattttggcctagtgatcaaaattgtgctaggattaagtttctggaagaaagaaattttgaaagaaaaaagtgaaagtgcttgctttctagtttggaaccatgatttcggattccctggtcctatggctctttgcacttcccctacacctttccaatgattgcttcatttactcaaaccaaaaccaaaaccaaaaccaaaacaagccccaagtcccccaaacctgttaaaagataccagtggagcattggctatgtgcaaactctgtgacagacaccgggaatgagacaccaaggcagataaaagtcttacaatctaatcaaatggaagcacacaccaaagaaatactttcacaactaatcatttaattaccatgctttccccacaaaacattttattactataattgatatttttcttaccatttttggcaacattaatcaaataataaatttcatctggaagaacaagccagcaaaatagacaaggaaattcacaaaggtaataacaaaatagtaatcttgacatattcaatatatttgtaagcaaagcaaagtgacattgccttaaaatatagagaggtatcaacagaaaaacagagaaaactcctgaaagagttcaactcattatataaattttaatttggttgcagttaatcaccattttcaatttgctgtgaagagaaatatacatgggatgcaatgagactatgtctgagttgcatccaaacttctaacctaccccgtctacttgtgatttcttttccatttgcctcactgtagtgtattggctaaacatgtagacaggtagatctgactacagggtttcatatctggttttggcccttcgtggatgtgtaaccttagctaagttactgaacctacctgagccctaggtccctcagctgtcgagtgaaaataatagaagtacctactcctaggcttatcatgaaaatcagatgagatgatctgagtgaaagcacttagccttggaatggagcacacagcaggtgctcaattaaggctagttgttattattagtctctgaaagtgatctctacattgttctctcccccatgccgggaggcactgaattaacttactcaagatgcgacaaggaacatagtttggagactgacttagcactgacctgcccctgtcagagcctggacattgttcaatagctgtgcattttggggcaagccacacacccccctgggagaccccattgccctcatctacaaaaggaagatgataaatccctttgacaattagagttaataagtagaaaacacttagctcaggaaatgtccgctgctgttattatttttttttaaatttgtatttttttgtaattttatcggagcctcttttcattatacagctgctgttattattacattaatattatttttaggctctgtaaaaaacataataatgccttactatgtcttttaatcccacaggtttagtggtgtttatgcctcaatttgaaagtggaatttcaaagtccactgaaagtctttctctgaagagtgaattgtctttatcccttagcgtctctcctgaaagctcttatttggtgagtaaatttacaagacgggtgctagataagggattcatgtggagtttgtccttaaaacacttctttaatctctgcagttgctgtggaatttgtgtcatttttgcttgggtgatcagattacatttcataaacaatatcccctatgtttaaaaatctttaaacagccacttggaagtagcttgacgtggactacagttaatgccttgtttaatgtggctcctccgtggtagacagggctgacaatcaactgcatatgcccgcatcagactcctaagtagatttctatattttacagaatttttttcttatttgaactagttttttggttttctaatatctcatataggataattttggtacaacgatggttcttgtaagcttccaaaaattggaatcatttttattgctcttttgcccttgttaaatcttggttttcttcatccagaactttcttttgagacagggtctcactctgctgcccacgctagagtgcagtgctgcagtctcggctcactgcagcctcaacctcccagtctcaagccatcctcccacctcaacctcctgagtagttgggactacagatgtgtgccaccaaaccaggattctagagagatacacacacacacacacacacacacacacacacacacacatatatacatatatatacacacacacatatatatacacacatatatatatacacacacacatatatacacacacacatatatatatatatacacacacacacacacatattcttttgagacagagtctttctctgttgctcaggctgaagtgcagtggtgcaatctcggcttgctgcaacttccatcccccaggttcaagcaattctcctgcctcagcctcccaagtagccgggattacaggcgtgcaccaccatgcccggctaatttttctgtttttaatagagacaaggtttcaccatgttggccagtctggtctcaaactcctgacctcaagtgatccacccgcctgggcctctcaaagtgatgggattacaggtgtgagccatcgtgtccggctgtattttttaaaatagagatgaggtttcaccatgttggtcaggctggtctcaaactcttcggctcaagtggtctgcccgccttggcctcccaaagtgctgggtttacaggtttgagccactgtgcccagccagaactttcaaacatcaaaattgccagctcactctgacccttccccaccttaatcaccctgggaatgactggggagaactggatattttattttcttaacatggtaaaaccccatctctactaaaaatacaaaaattagctgggcatggtagcgcacgtgcatctgcctctgttcactgcaacttggtctggcctcagggttttttgcccttgcttttccctgggcctctacagttctgcccccagagctttgcctggctcttttttttttttttttttttttttttttgagacagaatcttgctctgttgccaggctggagtgcagtggcgggatctcagctcactgcaacctctgtctcctgggttcaagtgattctcatgcctcaacctcccgagtagctgggactacaggttcgcaccaccacacccatctaatttttgtatttttagtagagatggggtttcaccatgttggccaggatggtgttaatctcctgacctcgtgatctacctgcctcgacctcccaaagtgttgggattacaggtatgagccaccgcgcctggcctgcctggctcttttctaactgttcctgttcagcaaaaatgtcacttcctccaggagccttccctgatgtcccctgccctgcttcagtggcttcgcagcactgagcagtatctggaattgtcttttctatttaattctagcattgtttttcccctccccttctagaacagggtagaataggagctgtcactctcaacactattgacagttgggaccaggtaactttttgttccaggggccgttctgtgcctgacagggtctgtatgtagtgtgtccccggccttcactcactggatgccaccagcagcttctccttgccccccgccagctggacaataaaaaatgtctccagatattaccaaatgtcttctggggcaagggggcaaaattgcactgatctagaatttaaggtcttttttttttaagagacggagtctcgctctgttgcccaggctggagtgcagtggcacaatctcggctcactgcaacctctgcctcctgggttgaagtgattcttctgcctcagcctcctgagtaactgggattacaggcacgcaccaccacgtctgggtaatttttggaatttttaatagagacaggatttcaccatgttggccaggctggtctcgaactcctgacctcaggtgatccacccgcctcagcctcccaaagtgctggaattacaggtgtgagctactgtgctcggcaatatctgtctaattttagctcctgttttcttaaccactctgccatagcacttctgttaaagctattcggcaacaaataaatcttttttagcattaaaaatacaaaaaatcatgctaaaagatgcccagggcttctgttattatgacctatgcttccttcttgtgtctttaaaaacattcaattgttactgtttatattttctctattttaaaattttaaaccatccccgcacagcttgcctggaaactgttgacactgaaacatataggttaaattcatacaagctggcctattatagtcttcctgcaaagtgcacagtgaattgcaaatgtttgcatttcccattaacaagaaaattagtgtctctagaaacagtagtcttctctggaccagcattaaatgcctgttttgttcttttcaagttgctcgagttcataatggggctttggtcctcatatctttttttttttttttttttgatacggagtcctgctctgttgcccaggctggagtgtgcaatggcgtgatctcagcacactgcagcctccgcctccaggcttcaagtgattctcctgccttagcctcccgagtagctgggactgcaggcgactgccaccacgcccggctaatttttttgtatttttagtagagacggggttttgccatgttggccaggctggtctctaactcctgacctcaggtgatctgcccgcctcagcctcccaaagtcctgggatgacaggcgtgagcctcagcgctcagcctggtcctggtatctttcacttactcttcacaattgtgtgtgacttcttttctggttgcaggattggttacaacctcctccattaagcctgaattaatctttactctctgattcctggaccatatccttgaatgcttgcatcctaacatccagtaagacacctccgtactgcctttttcatcctggcaaatcacaaactgatacttccagcactttgggaacaaacttctgctacaggacacaaatgcatggctgctaggaagctcttggtgcctgaaaacatatgccaggactcagagcacaggtgtgtgtgtgcgtgtgcatgtgttggattgttataaatttattaatttattttggggagtttttggaaaaggtagcaaaacagcctcacagggaatcactactgttcagggaagtattaaatagaaaatgattgggctgggcgcggtggctcacgcctgttatcccagcactctgggaggccacggcgggtgcgagatcaggagtttgagaccagcctggctaacatggtaaaaccccttctctacccaaactacaaaaattagccaggcatggtgtcacacgcctgtaatcccagctacccgggaggctgaggcatgagaatcacttgaacttgggaggcggaggctgcagtgagctgagattgtaccactgcccttcagactgggtgacagagtgagactctgtctgaaaaaacaaccaaacaaacaaacaaacaaaaaaacgaaaaaaaaaagagaatgagtgaatctttatgtattttaaaaggtgttggccaggtgcagtggctcatgcctataatcccagcactttgggaggccaaggcgagcggatcatgaggtcaagagatcgcgaccatcctggccaacatggtgaaaccccatctctactaaaaatacaaaaactaactggacctggtggcgtgcacctgttgtctcagctactcaggaggctgaggcaggagaattgcttgaacctgggaggtagaggttgcagtgagccgagatcacaccattgtactccagcctggcaatagtgggagactccgtctcaaaaaaaaaaaaaaaaaaagggaaaggtgtcagtcttgctggctctgattcggatttccatttagcctcacagttcttcagtgagatccaaagtcgggaggcatgctggtgtagggcagaggtcagcccacaggtcaatccaggttgctgcctagttttgtaacttaaagatcatgtttgagctgcatatttgagtaggattttgctatgcagatggggaagcaagaacattctaagatggcctagcaaactccagtctgggggccaaacctgtcacactgcctgtttttataaataagatttttaatttgaacacagctacactcatttatatattgtctctgattgcttttactctacaatggcagagactggatgggctccaatgactaaaatatttactgtctgatcctttacagaaaaaaaaaaaaatccacccgtggtgtaaggcttaaacatttaggctatgaatcaacagcctgtgttcaaattccagctccaccaactgacttctgtgtaaccttggttacacacttataaaatggaaatatgaattcctctgggttgatgtgagaagtaaattcagtaatcctagtaagtgcttactcagtgacagttattatgattcatccaaattaaagaagattttcagaggcttcccatagtcttaatgccctagattataatcatactagatgttctctgtccttataaaaattaaacatctaaaatatttgaggaatttgggcagccacctttcctgttccaggaatgaaaggttcataaaatactggcagtacattttcagttatttgatgttgattaatagagtcatggaaacctagaaggtctccaggggtgtgccctgggaccctgtctttgatctatcctggatatcattttgattcaggactaaagaattaaggttttcagatgcaatttctaggagacaaaatattggtattacaggatcaagattcacaatggtctccatagcttcaaatgaaggattggaagaaataagagagcatttaccagggattgatgtggattctggcatcaattattcacttctgggaatggggagacttggccagacagcagttcctgggaagtagttctggggcttctcgttggccacaagttcaatttgagccagatgcatacagctgccgacaagcaaagaatcttaggctgcattaatggagtcaggatatgccttgtgggctccaaggacaataaagaaagaaaacaatttgaatgagctaggcaacccatgtttgcagaatggaggttcgttatggaaacaaagtacaatttttaatgaggatcctgccaaagtttcataggttgagggggcggtaggggaagaggcgagttgatgagtgatctgggaactatgtcataatgaggaatggctgaaggatttagggagtttcccaggaaaagagatgaccacaagggaagaaagctttgggaaaccactgaaggtcttccgtgtggaagaaggtgccttattatctctattgctttttggcaaaacttggagaaaataaatgtgaggtacttatcttttgcgatatcagctcggctcagtgtttcttgtatccctgccctgagtccactgtctcagctaaggggagtccctggaagccatatttgttcttcataaccctgttgatagctgatccaacaagagatgaatgcctgctggaaaccaaaacaatcgagttctctaccccagggaacatggaagttgccttgaggactgtcagtcggcctctttgaatagttggatctgtaaggtataaatctgagcacaaaggtagacattttccaccatgacaatgcaccgacagagaaagtcaatctacagtgaaaagaatgaggccaagatgcagagaagcaggaatggaaaagcagaaggccaggccgggcatggtggctcacacctgtaatcccagcactttgggaggttgaggcgggcagatcacctgaggtcaggagtttgagaccagcctggccaacaggttgaaacaccgtctctattaaaaatacaaaaattagccggatgtggtggcgcatgcctgtaattccagctacttgggaggctgaggcaggagaatcgcttgaatccgggaggcggaggttgcagtgagctgagattgcacattgcactccagcctgggtgacagagcaagactccatctcaaaggaaaaaaaaaaaaagaagaaaaacagaaggtcttgctggttggattattttattttgttcatttacttattttgttgtagatataggaactttctatgttgctaacgctgatcttgaatccctggcctcctgcctcagcctcccaaaacactgggattacaggcattcagccaccatgcccagcctggtcaggttctttttagcttcccatctcctggtttcagtccttcctaaggcctaatcaccttcctggacttgggcttcatgagatatctttttgttcttgttataaattctccctttttacttctgctagttcaactaggtttcttcatgtacaaccaaaagtgtcgtagctatatcagagcacagtagagagtagctcagtagatggaagacacggtgaatctgttcagccgcttgagagagttacttcaagaagttaaggctatggccgggcgaggtggctcacgcctgtaatcccagcactttgggaggccgaggcaggcaaatcacaaggtcaggagttcgagatcagcctggcctatatagtgaaaccctgtctctactaaaaatacaaaaattagccagaagtggtggcaggctgaggcaggagaattgcttgaacccgggaggcagaggttgcaatgagccgagatggagccaccactgcactccagcctgggtgacagagcgagactctgtctcagaaaaaaaaacaaaaaacaaaagagaagtaaggctatttcctgggagcacacaggtggaagtgaaataaccctagataactgggaggcataatgaaagcttgggcttgaacttcagaaaaacttgggattaattttaagcaccaccaccactttctagctgggaccttggacagtggtcttaacttttactgagcctttttcttgtgcaagatggggagaatacggcatacctcatagaatggttgaggatgaaataagctactctattagtttcctattgctactgtaagagattgccacaaacttagtggcttaaaacaaattcagaggccgccacggtggctcatgcctgtaatttccacactctgggaggctgaggtggccagattgcttgagcccaggagttcaagaccagcctgggcaacatggaaataccccgtctctagtttttgtattttttttaatacaaaaagttagccaggtgtgctggtgcacacctgtggtcccatctacttgggagcctgaggtgggaggatctcttgagcctgggaagcagaggttgcagtaagctgagactggtaccaccgcactccagcctggatgacagagcgagactctgtctcaaacaaaacaaaaggaaacaaaacaaaaatttaggccaggtgcggtggctcactcctgtaaatctcagcactttgggaggctgagacagaaggatcctagtccaggagtttgagaccagcctgggcaacacagccagactccatctctacaaaaacgaaagttaaaataattagccagggatggtggtgcacacctgtattcccagctactccggaggctgaggtgggaggattgcttaagcctaggagttaaaggctgcaatgaactatgatcatcactgcactccagcctgggtgacacagtgaacagtgagactttgtctcaaaaaaaattttttttaaaattcttaattaggaggttattatttatttatttatttatctgagactgagtctcactctcttactcacggtggagtacagtggtgtgatctcagctcactgcaacctccgcctcccaggttcaagtgattcttgcgcttcagtctcctgagtagctgggattacaggcgtttgccaccatgtccagctaagttttgtatttttagtagagatgggatttcaccctgttggccaggctggttttgaactcctgacctcaggtggtccaccctcctcggcttcccaaagtgttgggattacaggcgtgagccactgagcccggccattattttaataggattctttctggtgaatggtgagatttccatgaaggatcttaaaggacaaagactcagtcgatcttggtttccacacctcacttcatcatttaactgtgtgatggtgggtaaggttaatgcacctttctgaagctatatcctcatctgtaaagcgtgtgttcatagtttttctggtagggtttctatgacaatatgattgcaggcggaagcactttctatagcaccatacaaatattacttacaattcctagataattcaccaaaagattaatcagcaggtgaacagcacagagactgtgaccctcttgtggacaaaaaggtgagattagatgcaaagtttccacctcagctcacaatcgttcttctacccctgccctgagtccactgagtccacagctaaagggagtccctggaagccatatttgttcttcataacccagttgatagctgatccaacaagagatgaatgcctgctggaaactagaacaatcgagttctttcccccagggaacatggaagttgccttgaggactgtcagtcggccacagcaaaggcaaagtttccagataaaacgaggcacctgccaggtctctaggctggagcgaagccatcattgcacaacttcaaatgtcccagaacaaagatagacattggctggctgggaagcagctgtcgttctgcctcggggtgacaggcgtcattttcttgagttgctagctcatggtaaaggtctgctttctatagtggagacctagatgtgcaagtcccagcaagcctggggcttgggggatccgggtgctagctgtggtttgatcacccatcatcgatggccttaggacttttttttttttttgagatggagacttactgtcaccaaagctggagtgtagtggcgtgatctcggctcactgtaacctccacctcccgggttcaagcaatcctcctgcctcagcctccctagtggctgggattacaggcactcaacaccatgccctgctaggttttttatttttagcagagacggggtttcgccatgttggccaggctgttctcaaactcctggcctcaagtgatatgcccaccttggcctcccaaagtgctgggattacaggaatgagccaccacgcccagccgggactttttccttttctggaatcagttttcccacctggcaaaggggcaaattggatgagatcatgtaatctatggtttatgtagttattttaataaatagaccaaaaagagagaagggaattccttgccaacatgtagagtttttcgtattttcttaagtggtcctggaggtatctgaacaccacagtaaaatgtaaatgaaactgttttataatattcatgttctaaaagttaaaatttcaggccagacaccgtggcttatgcctgtaatcccagcactttgggaagccgaggcaggtgatcatctgaggtcgggagttcgagaccagcctgaccaacatggaggaaccccgtctctactaaaaatacaaaaaaattagccgggcgtggtggcgcatgcctgtaatcccagctacttgggacgctgaggcaggagaatagcttgaacccaggaggcggaggttgcagtgagccaagatcgtgccattacactcctgcctgggggacaagagcaaaactctgtctcaaaaaaaaaaaaaaaagttaaaatttcgacaggtgaaaatggtttccctctgtctttttggttgtgatctcttagttttcatctccacagacaagcagttacaggaaatcttgcacaggacagctgcccgtagcaaaaaattatctggtgcaaaatgtcagcagtgctaaggttgagaaaccttgctttacacatatattagcaaatataagtgcgcatgcacacacagaggcacacacaccctttcatacacaaatgggggctacactgcacatatttctacatctcgtcttttttacctaaccatggagatagttgtgtatctgcacagatagactctttcgagctgcagaatactgtattctcctgtacagatagatcacttatttactcagtcccctattgatagacattcagattgctgccagcttctacaaataatattgctataattattcttgttcatagctttgtgtgcaaatgcccatatgctattgtatctgtctgataattcctctaaacagaataatcaggtcaaagagtatgcagctttaaaatgttgacagacctcacagaagtcctccaaagatgactgatttatgttcttaccaactatgtagtgctatgccttgctgacacctttattaacaaaatagagccttctgtctttaagttgacttagcttcaactaattatgtatttgaaaccaactgtaatttccaaccattcgtttttcaacaaacatttatcctttgtgtcaggaactgggatgagaggaatgaggggataccctcaaaatatcctcattagactagaggtacagagacaggctaacacatagtttgtaccacagtgtgacaaaggctatgaattaggtaacataacataaaggatatttcctgtagcttttagttttcatggaggcccagggtgtgtccaatcttctaattttctttttctttctttcttttttctcttgagacagttttgctcgtgttgcccaggctgcagtacaatggcgcgatcttggctcactgcaacctccgcctcccgggttcaagcgattctcctgcctcagcctcctgagtagctgagattacaggcatgcaccaccacgcccggctaatttttttgtatttgtattagagatggggtttcaccatgttgatcggctggtcttgaactaccgacctcaggtgatctgcccacctcggtctcccagagtgctgggattacaggcatgagccaccacgcccggcctttttctttctttcattcttttttttttttgagacagagtctcgctctgttgcccaggctggagtgcagtggtgtgatctcagctcactgcaacctcaacctcttggactcaagcgatcctcccacctcagcctctcaagtagctggggctacagacgcaccaccacgcccagctaattttgtttattttttgtacaggctaggtcctactatgttgcccaggctggtcttgaactcctggactcaagcaatcctcctgcctcggcctcccaaagtgccgggattataggcatgagccaccgcacccagccttaatttttcaagaaaagcctggaaactaggtttttatatcacagctttttattttgaaatattggcaaaaaatttaaatattatttcagttggcataatgtcctcaaggttcatccatgttgtagcattttattttatttatcttttgagactgagtctcactctgtcacccaggctggagtgcagcggcacaatctgcaacatctgcctcccagcttccagtgattctccttcctcagcctcctgaggagctgggattacaggtgcatgccaccatgcccggctaatttttgtatttttagtagagatggggtttcaccagattggccaggctggtctcgaacttctgacctcaagtgatccgcctccctcggcctcccaaagtgttgggataacaggcgtgagccaccatgctggtcatgttgtagcattttaatgttgaataatgtttcattatatatatgtactgcgtttttgttaattcattaatctaatgatggatatttgggttgtttctaccttttgactattgggaatgatgtggatataaatactgatgtacaaatatctgagtcccagttttcaattcttttagatatatatatctaggagtgggattgctgaattatgttctaattctgtatttacctttaagattttttaactttaaacattttaatctgtatttaatggaaaaacataagaaaggaaaaatatcccagaggaaaaatatgcaaataaattctacctctggttgatatacagttattaataacaaaactagtgtgagtttagagagaatgtttagcaaacactgataaatgaaaagaaaaaaaattaccaaaaaccctgtatctgcaaaacaaccactgttaatagtgatctttattttcagagaatacaaatatagatcaagattaatagtgaaaataaggccagcatttagaacagtatatgtaaaatcattatttaaaaacaaacaaggctgggtacggtggctcacacctgtaatcccagcactttgggagaccgaggcgggcagatcacctgaagtcaggagttcaagaccagcctggccaacatggtgaaaccccgactctactaaaaatacaaaaaaaattagcgaggcatggtggtggcaggtgcttgtaatcccacctactcaggaggctgaggaaggagaattgcttgaacctgggaagtgcaggttgcagggagccgagatcgtgccattgcactccagcctggtcaacaagagcgaaactccgtctcaaacaaacaaacaaacaaacaaacaaactaggccaggcacggtggctcacgcctgtaatcccagcactttgggaggccgaggtgggagaatcgcttgaggccaggagttcaagaccagcctggccaacatggtaaaaccctgtcactaccaaaaatacaaaaattagccaggcacggtggtgcgcacctgtagtcccagctatttgggaggctgaggcagaagaattgcttgaggctgggaggcagaggttgtagcaagctgagatcatgccattgcactctagtgtgggagacagagtgagaccctgtctcaaaacaaaaaacaaacaacccccgccccgaaaaaaaaccccaaaacaaaacaaaaaaaacaaacaaagccaagatctctctgaggttgtgccaagcccactgtgctttttctcatttatcttggcttctgaaagaaaggaatgctattatgaccactttacagtgggaaaggttgtgtcgtagggcttctacatcatgtgtcagagctgggatttgaacccaggccatcccagtgcccatgtttacctgtaggcacagcagcctcacagatgtcacatcacacacagtgtttgcgaaatttatctcaacttttgttgtgatgaaaaatttccgacaaatacttttctgcaagataattttttaaccactgcacactattccagggatgggtgtatcaatcccatacatctctattgattatgtctccatgatttcatgtttatactattacatcaatgaggtgaatagcattgtctatatatatttgcacgcattcttattttttttaggataaattcccagaagtggaattgcccaataaaacaaaaaagacttcaagccatttgatatacactgccaagctggctctcagaaaattgtgctaatttacatttctaacatcagtatataagagtgctttcttctatatgttaccaacactggttattaacaatggaaattcttttgcaaatcttatagttcaaaatattatatattaccttattattcatgatattttctggtaaaattaaaatgctaaccataccaagagtaggcaagaatgtagagggacttggccaggcacaatggatcacacctgtaatactagcactttgggaggccaaggtgggtggatcatttgttgggagttcaagaccagcctggctgacatggtgaaaccccatctctactaaaaatttaaaaattagcttggcatggttgtgtgctcctgtaatcccagctactcgagaggctgaggctggagaatcgcttgaaactgggaggtggaggaggttgcagtgagccgtgattgcaccactgtactctagcctgggtgacagactgagactctatctcaaaaaaaaaagctgccatgggggctcatgcctgtaatcccagcactttgggaggccgaggtgggtggatcacctggggtcgggagtttgagaccaacctgaccaacatggagaaaccctgtctctactaaaaatacaaaattagctgggcatggtggcgcatgcctgtaatcccagctactcaggaggctgaggcaggagaatcacttgaacctgggaggcgtaggttgtggtgagctgagatggtgccgttgcactccagcctgggcaacaagaatgaaacttcatctcagaaaagaaaagaaagaaagaaaaagaatgtggagggactggaactctcatataccactggtaggaaagaaagatgttgcaaccattctggaaaatagtttgacagtttctttaaaagttcaatgtccatctaccctatgatctagccatttcatgccttggtatttatccaagagaaaaggaaatagatgtccatacaaagagttgtacacaaatgtttatagtggttttaattgtaataacttcaaactgaaaataaaccatatgtccgtcaacaacttaatagataaacaaattgtggtacatccatacaatggaatagcactcagcaataaaagtaaatgaactattgatacatgcaatgacattagtgattctcaaaattattatgctgagtgaaagatgccagacaacaaagagtacatgccatttgattccatttgtataaacactaagaagtatacactaatctccatttagtgacactaacctataatgacactaatctatagtaaagcagaccagtggttgcctggtaatcggcgggaggaacaaaataaagtaattacaaagaaatcttttggactaatggatatggttactatattgatttgtggtgatgatttcatggtcatatacatagaacagaacaaaacaaattgtaccttttcaatatgtgtagttattgtatgttaattacatgtcaataaagatgcttttaaaaatccccccaggtaggccaggtgcagtggctcatgcctataagtccagcactttgggaggacaaggtgggaggattgcttgagctcaggagtttgagaccagcttgggcaacatggcaaaactctgtctctacccaaaatacaaaaattagcttggcatggtggtgcatgcctgtggtcccagctacttgggagactgagatgggaggattgcgggagactgggaagttgaggctgcagtgcgccatgatgatgctactgcactgtagcttgggtgagagaatgagaccctgtctcaaaaaaaaaaaaaaaaaaaaaattcctctcaggacggttggccctacgtacgtgcggattctgtatccatggattaactcaactcaactgaaaatatttgaaaaaaaaaaaaaaaagatgattgccgggcgcagtggctcacgcctttaatcccagcactttgggaggctgaggtgggcggatcacctgaggtcaggagttcgagaccagcctgaccaacatggagaaaccccgcctctactaaaaatacaaaaaaattagccgggcttggtggcacatgcctgtaatcccagctactcaggaggctgaggcaggagaatcacttgaacccgggaggcgaaggttgtgttgagcagagattgcgctattgcattccagcctgggcaacaagcgtgaaactctgtttaaaaaaaaaaaaaatgcatctgcagtgaacatgtactgactttctttcttgtcgtttcctgaataatactgtacaacaactatttatataggcttaggtgttataagtaatctacaggtaacttaatgtgtacaggaggatgtacataagctgtatgcaaatatacctttttcttttgttttttgagacagggtgtgtttctgttgcccaggctggagtgcagtggcaagatcttgactcactgcaatctccacctactgggcttaagccatcttcccacctcagcctcccaagtagcagggactacagggggacgccatcatgctgagctaatatttgtactttttgtagagatgaggtttcgccatgttgtctagactatgctggaactcctgagctgaagtgatccgcctaccttggcctgccaaatacacctttttctgtcaggaacttgagcatctgtggattttggtatccgtgggaggtcctggaaccaatcccccagggatatggagggacaactgtattacaatattctcattgttttacttattgttgttgtttactaagcaggggcactgaatatggtcaggcaggctgccagtttcacagttctctatttggagtgtctgtttccaaatagacaccccccccgaagctgtgaaatggggcagcttcgccaataagctgaacatcatggcatctattgatcagccttttatatttctttttacgggtattgcctttattttgaggattttccatctgtaagttctctttatataggctattaggcgtctgtcatacatgttgcaaagatgttttccagctttgcaatttggagttgacttttgacaccgatgaaccagtgacaattacttctgatccgataacttatttgttggcaaagcatggtcctgtgaattcctttcttggcacctaggatcattgcttcagcatctgttcttttagaaaacaggtttgtccagcaacttgtatttgtcatcttccttgtgatttgtttgatcaagtacattgtctgttaagttgagttgctgctggctttcaggtcaaacgcattaggctttaataggcattctgaagtgcttaccaaacccagctctgtagtaaaggaactgttaagagtccttcttttctcttttccttctcctacttttatttcagtttgttgaattcctcccataatctgcctctgggttaaaggctttacgttatcttttcacatctaattctcataaccttgtgatcctaggtgtggttagttccgttttttatttaaggaaactaacttgtggagaagtaaaaaaaaaaaaattctacccagaatcacatgggtagcaggtgaggaaagtgacttttgaacttacattggtcagactccaaaagtcaagctcttaaccttcaccctactacctctaacttaccctggctttcaatgagttgcttgtgtgtttcttcgtcttttaaccctgataaagagatttggtgcacaataggacctgagatctattgggttgagaaagagaaagaatattctatgtggggtgggctgaggaggtgtttccaaaatgtttccacttcagtttcatacacaaacatacaatggatgaaaaagcaggaaggcaataagctcactttgttacacactcctccgcagtcaggttgtacataatgccgctacgagcagcttctcaacctcagcactgttgacattttgggtggataattctttgttttgtgttgctgtcgtgtgccttggatatttagcagtatccctggcctctacccactagatgccagtagcacctccacccctgctgtgacaatggaaaatgtttccagacattgccaaacgtcctctgggaggaagaatcgcccctggtaaacactcaatggcctatgattaataaaggcttaacaatgcctttcacagctccaaagaaatatccatagattacaaggctaataaagatacactgggtcatgtatttctctccttctctctctctctcttttttttttcccgctagcagaatttcctagtggaagctgaatgtttgattagcacacttagaaaccgtagaaatgtttatttaaatatatggctaacacaaagaaaacatttttatcattattttctcattacagataatttttttttttgaggtggagtttcgctcttgttgcccaggcaggagtgcaatggcatgatctcagctcaccacaacctccgcctcccgggttcaagtgattctcctgcctcagcctctcgagtagctgggattacaggcatgtgccaccacacccggttaattttgtatttttagtagaggcggggtttcttcatgttgatcagactggtctcgaactcctgacctctggtgatccgccagccttggcctcccaaagtgctgggattataggtgtgagccactgtgcccgaccattacagataacttttattgaactcatactgtttgccagtcccaatgctaaatcccttactatgtcatttatctcatttatgactcacaggttttaaaaatagacatgaatgttatgcccattttactgatgaggaaattgagatttacaaacattaaataacttcttttaagatcactggaaagattaatgcagctgaaaacttaacccaagtttgttttacactggggtttatttacactactgacttccaaaattaatattcatccacagtaggacaattaaacacaatcattaaaaacaaaatgaagactataaaatcagtgctatcttaccactcagcaataatctgtattgacattttgctatgaattcattcagtcttcattctctgcatttaaaaacatatatgctttagaaaaaacgaaacatgtttaatatcctatgttttttctttatatttgggactacttttccatcatgatgttaaacattctttactaagtaccatttaaaagggctatataaaaattaaaaaaattaaccagacatggtggcatgtacctgtagtcccagctacttgggaggatgaagtgggaggtttctttgagccaaggagttagagaccagcctggacaacatagtgagacccccacctctaaaaaaataaaaatatttagccaggggtagtggcgtgtgcctgttgtcccaactacttgggaggctgaggcaggagggttgcttgagcccaagagtttgaggctgtagtaagctatgatcgtgccactgcactccagcatgggtgacataatgagaccctgtcgcaaaatgaatgaatgaatgaatgaataaatgaaagagctatttcatattctaccagggaacatttaaacagtctcccattgccagacattctggttgtatttttttcctctctccctctctccttctcccaccctctctctttctttctttttcatgttatttacacaagataaattcctagcagtgaaatactggagtaaaagtaatcctatgtattttgaagagtgccgatgtcatcaaaaagtgatatatttttaaggctcatgatgcatgctgtcaaatgcacccccccaaaggttgtactgatttacattttacctgcattggatggatggatatacttttttcctccaaaaaacaaagggcttctaactaattaaaaacaaaaaaacatggccaggcatggtggctcacgcctgcaatcccagcactttgggaggctgaggtgggcggattacctgaggtcgggagttcgagaccagcctggtcaacactgcaaaaccctgtctctactaaaaatacaaaaattagccgggtgtggtggcacatgcctgtagtctcagctacttgggaggctgaggcaggagaatcggttgaacccggggggcagaggttgcagtgagccaagatcacaccactgcacttcagcctgggcgacagagcgagactccatctcaaaaacagacaaaaaaatacacacacatatgcatattcacacacacacacacacacacacacacacacacacacgcttgtagatatcacagagaaagtcatattgccttttatttgcatttctttgctagtaatagttctttatgaaacatgagaaatttatgcacttaacaagaagtagtgggggagtagtagttaaagatagactctgcaatatgaggaatagtgagacccatttcacagatgaaaaagtgtgtagacctaaaatgttaatgtgtatatttaattatacaacataactgcaaatcaatgtaagagaataggtttaaactccttacaaacatacttcttatatatctcataaatctgaaccctaagatgaaagcaaattgacaaattaatacaaacaaaactatgaggacttggaaacccaaattagcagcaataatttcatatgtggatgaaacaactgcacagaagtgcaatctctgtaagcagtgtggatgccttgtcatggcactttctgagtctgcaatgactcagcccatcctccacttttctcctgaatcacgaaaaacaaagcattcctgctggcacaaatgcatcctttacatgcccatcctgcctctttcttcttcccattcactccacaagtaaagtaatataacttggggtcatttattgtaaacccaagtacacaattaagtgggatgtttagttagcatacggaaatattatgtttagatcatttgcgaaagagaatggaaatgtaaactactttcttataggaaactaaaacccacttagctaaatgttgaaagcataggccaaggatgagacagactgagcaagtcagagccacagtgttcttatctgtgaaatggaggaaataatagttaccccataggttgtagtagattgagtcagaataatgcaggtaggctgcttatgacatgcaaactattattaaaacatgttttccattcgtcatttggtttcttagagacaacccagattttcgtcttctttttttttttagacagaatctcgctctgttgcccaggctggagcacagtggcgcaatcttggcttactgcaacctctgcctcctgggtctaaaccattcttgtgcctcagcctcccgagtagctggaattacaggcacgacctaccatgcctggttaatttttttgtatttttagtagagatggcatttcgccatgtgggccagtctggtctcgaactcctgagctcaagtgatccgcctgcctcggccttccaaagtgttggaattacagggatgagccaccatgctggtatctctttttggtggtatctctttttccctccctgtatccataccctttgcacatactacctttgtgatctcttccatgaagaaatgagatctatttcccacaccttgaatagcagctggatttttgtcttgctttggccaacggaatcctgttgtatttaaggagaaatgtttcattccaaaacaagaccacagattattttaaaagtccccaaagcaggagatctgtgttccatgatccccccccgcccctgcatttgctccactcagccaaggtctagctggagtgtttttacaccaagatttctgttcgttttcattgatacaattcagttgcacagagcgcttcttaatctctctgctcaaataattggatgtgtttcgagtgattttctaagtgagagaatcagtggtttctatgcagcataaacaccgggaacctgattcacaactttcttagtggagtctgacatctacagaagcctccctgcggatcttgactctccttcctggcatctgactccaggaaggtggcgtctgaaccacctcctgccaacaaaatcctgggaaaataaagctggacccattcaaggcgaaattccccatagccacagcaagctggaatgaatttacatgcacatttagttgatatttcctgcttgtctcttgaacatgtaaatggatgctactcctttctgtagaagcagggtcaggtaaggacacaattaatgcttacaggtttccctgagggctcccaggcccccaatctcccaatctcacacttccctaataccgtgactcatggagtctcatgctcacagtgaaaccctgaaacccctgccagttccttcaaatctttttaatctttttttttttttttttttttgagacggagtctcgcactgtcaacctggctggagtacaatggcacaatcttggctcactgtaccctctgcctcctggattcaagcgattctcctgcctcagcatcccgagtagctgggattataggcgcccaccaccatgtccggctaattttttgtattttttagtagagacagggttttactatgttggccaggctggtctcgaactcctgacctcatgatccacctgccttggcctcccaaagtgctgggattataggcatgagccatggcacctggcctcctccaaatctttctaagaaagcattttgaagcccaacttcattttcattattattattaattggggtccaattttgcatacaatacgttgcaaaggtttgtatttatttatttatttatttatttatttttatttctttatttgagatggagttttgctcttgttgcccaagctggaatgcagtggcatgatctcggctcactgcaacccatgcctcccgggttcaagtgattctccggcctcagcctctcaagtaggtgtgattacaggtgcacgccaccactctcggctaattttttgtatttttagtagaaacagggtttcaccatgttagccaggctggtctcgaactcctgacctcaggtgatccgcctgccttgggctcccaaagtgctgagattacaggtgtgagctaccacgcctggccaaattgcaaagattttaaatgtagttttatgtcttccaacaaagctctatacccttgtaaccactgctccaattgatataagaactcttttatcactgtacattcccttatgtctttttccagtaacaatccgtcctctcccgagattttgatttctaacaccgtagctcagtctggccagttttcaaacttcacataaatggaaccagacaaaatgatcacttttgtgtctggcttctttttattgaaatgtttttgagatgcgtctgcattgttatttatgtccttagttcattttaaaattacttctgagccatggtccattgtgtagctatacagcgctttaacaattcacccgttgatggacactttatttattttttccagtttttgactattatgaataaagctgcaatgaacatttctgtatgcatgtatatatttctttttggaaatgtgtgtttatttctcttgggtaaatacttagaaatggaattgctaggtcagggggtaaaagtatggttaatgtatgtataagaaactgtcaaactgttctccaaagtggagaacttacttgattttgagacttgtgattacattatgtgctgcatttcctgccctttattaacacaatagttttttttttcttctttgtctgggtaaaagagattgtaaaaagtggctgtatctttttcctccctgtatctataccctttgcacatatttttttgtgatcccttctatgaagaagtgggatctatttcccactccttgaatagcagctggatttttgacttgctttggccaacagaatgcagtagaaatagcagtgtaccggcaccaagctccagcctcaggagacctcatgagagtctgtttatattttggaacactgctactgccataggacaagcctggcctggctagatggatgggagaccacgtggagaagggcccagctgtctcagctaaagccatcatagaccaacatacagccagcctacttcctaacacatgagagagccctgtctggattagcagaaacacctactcaacacaaagctgattacagaagcacgagtgacctcaacttggaagagaagaaccccttggcagaacccataaactcataaacaatagcaaatgcttattgttttaagttgtggagttttgggattatatgttatgcagccatatgtgactgatacaggctagatcttcacctcttcccctaccatttactatttgtgtaaacatagtcaatgtagttaatatctctgaacttaaagacgtctcatctgtatgataggatcatgatacttgctttaaaaaacaatttggaggccaggcacggtggcttacatctgtagtcccaacactctgggaagccgaggtgggcagatcatgagatcaggggttcaagaccagcttggccaacatggtgaaaccccgtctctattaaagatacaaaaaattagtcaggtgtggtggtgcacacctgtaatccgagctacttgggaggctgaggcaggagaatcacttgaacctaggaggcagaggtagcagcgaactgagatcgcaccacagcactccagcctgggtgacagggcaagactctgtctcagaaaaaaaaaaaaatagcttggaggattagatgaaaaactgaaagaacatgaacagagctgataataaggctcaatacattctttctctagtaataataatgataaaaccaccacctcttctttttaccttaacacattttcttacagtaaaatcttctatgactttgggactagaaaggcctggacatgctcaagacttgtccttccagtttggagtatgagtgcattttccttcgccagatatttcatcatcacatggtctagttatttattttcattgattgagaagaacctgtgataaatgcacagttgtaaaatatcaagtgcttttgccgtggatttgtagtttatgaaattacaatagccttgccagtgcctttaaaagctagtgccacatgaaaaccaagatgcattcatttggtttacagatactgttttgtgtgtataacaagtcacaggatcctttcctatgatttcctagcttctcaaacccgtcgtctttcaccactgcaggggactatggccaacgggctagaaactattgattaaggccaatagaagactatgagacgcggcccttcatggaccaaactttccttaagcttgcttaattatggcccttgtcatgcctcgaagttcacctactaccaccgtttcgcttgttcattttgttcttgtttataagacagagtcttgctctcttgcccaggctggagtgcaatggcaggatctcagctcactgcaacctccgcctcccgggttcaagcaaatctcctgtttcagcctcccgagtagctgggattacaggcacccgcccctcacacctggctaatttttgtatttttagtagggatgggatttctccatgttggccaagctggtctcaaactcttggcctcaaatgatccactcacctcgacctcccaaagtgctgggattataggagtgagccactgcgccgtgccttgttccttttgttctatccacgctggccttctggctgttcttcaaccaagcaaaacgaggttttttgctacttcctctgcctgggaagcttgctcctggctcttcacatagccagctcgtttttcccttcagatttgtgcccaaagatcaccacagccgctgaacatggaggtgggaggagatgagcaataagaccattccttacatggtgtttccatgacacaggagaatcactgcaggagcacagatgatagcagcaaagtgtgggaaaatcattaggaagggatgagtttccactctttgtttcctttgttatttctatttttaaatttaatttaaattttttcatttttaatttttgtgggtacatagtaggtgtatatgtttatagggtacatgagatgtttggagacaggcatgcaatgtgaaataagcacatcatggagaatggggtatctatcttctcacgcatttatcctttgagttagaaacaatccaattacaatctttgagttattttaaaatgtacaattaagttatttttgactatagtcacccagttgtgctatccaatagcaagtcttattcattctgttttttctttttctttgagacagagtcttgctctgtcaccaggctggaatgcagtagcaagatcatggctcactacaacctggaactcttgggctcaaaagatcctctcccctaagcctcctgtgaggctaagactacaggtgtgcaccactgtgtctggataattttttaaaaaatttttaatttgtagagacaggtcttgctacatcgcccaggccggtttcaaactcctggcctcaagcaatcctcccgcctcagcctcccagagtgctgggattacaggcatgagccattttgcttgccttttaaatttttttttttttttttgagacggagtctcactctgtcacccaggttggagtgcagtggcgcgatctcggctcactgcaaggtctgcctcccgggttcacgccattctcctgcctcagcatcctgagtagctgggactacagtcgcccgccacaacgcccggctaattttttgtatttttagtagagacggggtttcaccatgttagccaggatggtctcaatctcctgacatcgtgatctgcctgcctcagcctcccaaagtgctgggattacaggtgtgagccaccgtgcccggcctaaattttttgtgtgtgtgtgtgtgataaaatgtacaaagcatgacatttaccattttaactagtgtgtaattcagtggcattaagtatagtcacaatgttgcatcaacatcaccactgctttcagaaattttcttttaaatcatcccaaacaccaactcgttaaaaactaactgcctgttcccttttccctccttccagcccctaggaatttctcttctattttctgtctttatgaattggcctattttagattattgtaagacttcacttaaatagatccacctcatataaacggagtagtacagtatttgtccttctgtgtctagattatgtcacttggaatatcctttggttttatttttaattttatttttttatttatttttgagatggagttttgctcttgttgcccaggctggagtgcaatggtgtgatctcagctcactgcaacttctgcctcccgggttcaagcgattctcctgcctcagcctcccgagtagctgggattacagacttctaccaccatgcccggctaattttttgtattttttagtagagacaggggttttaccatgttggccaggctggtctcgaactcctgacctcaagtgatccaccccactcagtctcccaaagtgctgggattacaggcgtgagccaccgcgccccgcatcctttggttttaatatcatttatttaaatttaagtttgggccgggtgcagtggctcatgcctatactcccaacaatttaggaggctgaggcgggaggactgcttgactcccggagtttgagaccagccctggcaatctagtgaaacctcatttcttcaaataatacaaaaaattagccaggtgtggtggcatgcgcctgtagtcccagctacttgggagactgaggtgggagaatcaggaggcagtgagccatggtcgcgccattgcgcaccagcctgggtggcagagtgaagccctgtcctctctctttttatatacatatacataaaataaaataaattttagtttgtagaatttaatttttttaaagattgtgtttaacaaccagcttgtgaaattcctgaaaacttaacaaccagctcttaagtgctggggtgagcccagggtccagcaatcttggagccagaactccagctgaggactctcaactccacagtcctcctctgtatcactgatcccacaggccttcctgactcaattgatcacctcatcagtgaccttatcacaaactgtggcagaacccaggcatcctaaccatcctccccactttggaaacgtggctgaagggtgtagtggcctgcccctgtagtcccggctactcaggagggtgaagtgggaggattgcttgagcccagggggtcaaggctgcagtgagccgagattgcaccattgcactccaccctggatgacaaagcaagacctatctcaagcaaacaaaaaacaataacaaaaaacgtggctgaaaaattggaaacattggtggtgcttttgtagcaagtccaactcttattaactcattttaggtcaaatacacacacaaatacagtgagatgggatctcactgtatccctcagattggagtgcagtggtgcaatctggggtcactgcaacctctgcctcctgggttcaagcaatcctcccacctcagcctcccgagcagctggcactacaggtgtgttccatcacacccagccaatttttgtatttttagtagagatggggtttcaccatgttggccaggctggtctcgaactcctgacctcagcttgccttggcctcccaaagtgctgcgattacaggcgtgagcccccatgcctaggttccttgatacagtttagatagttctcccctccaagtctcatgttgtaatctcatccccagtgttggaggtggggcctagcaggaggcattggggccatgggggtggacccccaatgagtgtgttggtgccatccttgctatagtgagtgtgttctcactctgttagttcccttgacagctggttgcttaaaagagcctggcacctcttcctatctctcttgctttctcttgtgtcatgtgacctctgcacccaccagctcccctttcccttccgccatgagtggaagcaacctgaggtcctcaccagatgtaaatactggtgccatgcttcttgtacagcctgcagaaccctaggtcaataagcttcttttctttttttgagacagggtatcactctgtcactgaggctggagtgaagtggcatgatcatggctcactgcacccttggcctcctgggctcaagcaatcctcctgtctcggccttccgagcagctgaaatcacaggcatgcaccaccacgcctggctaatttttaaattttttacagagatagggtctcgctctgctacccaggctggtctcaaagccctgggttcaagtggtcctcccaccttggcctcccaactcttccctttgtaaattatccatcctgtggtgttcctttacagcaacacaaaaagatttagacactcctactctattttctctctgatggtccgggatatacttgttttgtttttaacagcatttttggatatataattcacatatcatttcattcatctatttaaaccgtacaatccaatggtttttagtacattcgcagaattgtaaaaccaccaccaccattgaccttagaacattttcatcacttcaagaaagcccaaacccttccgttattaccctcttccttcatgtcctcccatccctgaacaagcactaacctactttctgtctctaatgattgacccattctgggcatttcatataaatggaattataaaatatatggtctctgtgactggcttctttcgcttactgtaatgttcaaggttcatccatattacagcatgtgtcagaacctcatttctttttatggataagcaattgtatgcatatgctacattttgtttatccattcatcctgtaatggacatttgggttgtttccaccttctgtctattgtgaatattgctgctataaacagtcatgtgcaagtctgtgtgtgaacatgtgttttcatttctcttgggtaaaatacctaggagtggaattgctgggtgatatggtaactctatatttaaccaaacagggaactgccagaatgttctccaaagtggccataccattttacatgaccacaagtggtgcaggaggagtccaattgctctacatcttcaacaaccagagtgcacgcatttgcctatctatcacctacacctgggaatataagtggcctgaaggctggaggtgctcacctctgtacacgtctcccaccttggaacatagtggaccatgcatagcagatgaatgagtaacatccctcttcttctagaaactagcatagcactcggcagaagaagggcttgcaggctgggcacagtggctcatgcctgtaatcccagcactttgggaggccaaggcagacggatcatgaggtcaggagattgcgaccatcctggccaacatagtgaaaccccatctctactaaaaatacaaaaattagctgggcgtggtagtgcgtgcctgtaatcccagctactcaggaggctgaggcaggagaattgcttgaacctgggaggcagagcttgcagtgagccaagatcgcaccactgcactccagcctggcgacacagtgagactccgtctcaaaaaaagaaaaaaaaacaaaggaaggacttggaaatcgttgaaacttgcaaagtctggtggttgtggagtccgtttggcatgcatccaatgtgcatttaattttaggctgaatttaaaatcgtttgttctcctccctcccccaacacacacacacacactccacacacacaatgaaatctcgctctctcatttaattttcacaactgcaaacaaatctatgaactcacatcaaggtcatggagccaaaccctatggcaagcaaggtggcttaggtgtgctccacagtctgtcaaggaacgctgggatgtggcagttgtattaaagacagggttaagaatgtcacacctgcaggcacagagagatttttttgtgctcatttctttggttgaactcagaggatctgcaaatcagggcagttggtcaagtgatctggaatcaagtccagactctattgtttaccatttgtgaggctctggacaggttattttttctttctgggccttactcttctcatgcatcaatgggaataacaatgtttacccccagagcgttattattaagtatgataatatttttatttttattttgagacaggttctcactctgtcgcccaggctggagtgtagtggcagtggtgtgattatggctcattgagcctcaacctgctggactcaagtgattctcctcagcctcctgcgtaggtgggactacacgtgtgtacctccacacctggctgaagtttttaaatttttggtagacatggggatcttactgtgttgcccaggctgatctcaatctcctgagctcagcgatccttctgcctcagcctcccaaagtcctggggttacaagtgtgagccaccaagcctgggctattaatatataagtataaggattaagtgaactgatatataatcaccccttcagtaactcccctcccacttaaaataaaatccaagaaaccaggatgtctggtcattctaactctagattactttggacttcaaagctcctatgcaataatgatgcctgaaacctagaagaaaaggaccagaattccagagggtccaaacttactttctgaattctgccaaggagaaacaatatcctatacacagcttggcagctaagggagaaggcagccatggtccttatcaacagtgaccatctataggatcatctaaattgggacgctcgtatggatacaacagatactattaataatcacacggggaccgcaagcattaaccaggacagtcctgggcaaattgggctgcaggctcaccccagtgtatctatttgcagaatctggagggcgggcctcctcagcaagcctctggcgcatgtttgaactgctcttaagctgttaagcactaagcgctgtcatcaaagtgtttttctgataagaagctcgaagtccactgagaagaatccagttgagataaatgggctctctactctgtgtccatgttacggttttcaaggttcaatagttacctgcctagggtctcctctgtaagtcaccaataacccagtttgattgtattaaaagcgctggagtttcttaggtcaaaaagaactggcataactgatgtagaaatagcagttattattttcccagcagctcttccactccaggcactgttctgagtcatttcagcatcgtgatctttcttggaggtggtcgttgttagacccattttacgagcgaggacactcaggctcagagtaaataaggaacttgtccgaggtcacacagcctataaggggcaggcctaagaatctgaatctggggaggtctgacagcaggtcctgggctctttatctgtgtggcctctttcttgtgtggcggtctttgatctgcatctcctggagcccttgggttaattgatctgtccataggaatccttaaccaggtgtccacggactcccaagcagtcctgggatagaatttatgatacattgattaacaaacagacaaacaaacaaaaacacatatatactctaatctgcattttctcatttttcccctttctttcttttttttttttttgtttgagacagagtctcgctctgtcgtccatgctggagtgtagtggcgcgatcctgactcactgcaacctctgcctgccaggctcaagcgattcttgtacctcagcctcctgagtagctgggactacaggcgtgtgctgccacgcccagctgatttttgtattttaagtagagacagggttatgccatgttggccaggctcgtttcgaactcctgacctcgtgatctgcccaccttggcctcccaaagtgctgggattacggtcgtgagccaccacgcccggcctattttccaccttttgaatataggcaaaccacagcagaattagcagtccttgagactttgttgccagtggaaaccagatattttcatcttacaccagagttacaaataataggaagtatcctctatagttattgctatctcaaaattacagttgttagaatctgcactgcatcttgtcacttaatgtgttaataaaaatgcacacatattaccatattatacatttgttttaacatttttaggggaactgcattttaatgtaattggatttctttgcaagcctgtgcatttttttgtcctgagaacgggatcacaggcttcctcagacaaccaacagggtccacggtacaaaaagatggaactactgcaaagagttgacgaatgggccagttagtaaacaaatcattcactctttatgtgcaaaattttatctaatttctccataacatcaccaaaacttgcacatgtaagtagagaaagccttaatggaaatttctcattcatttatttcttttctttctttttttttttttgagacggagtctctgttgcccaggatggggtgcagtggtgcgatctcagctcacggtaacctccacctcctggactcaagcgattctcctgcctcagcctcccgagtagctaggaccataggcacatgccaccgtgtgtggctaatttttatatttttagtagagacagggttttgccacgttggccaggctggtctcgaactcctgacctcaggtgagccaccctccttggcctcccaaagtgctgggattacaggtgtgagccaccatgcccagcccatttatttcttaaatggatgttaattgggcacctcctgggtaccaggccctgtgaatggcatgggagatacaggaggggacaggacaaacatagatgaaagccccagctttcgtggagctgacatgataagcggtcaaagcaacaatcaaacaataatcgtacatagaattagctaacccaagtgtgacgagctgtggcagaatgcactgagaattctttaaccaagtactgcttggccaagatctgaaagatgatcaagtgccaacaggcagagagtttaggcagagcagcccaggctcagcaccaaggagctgaagccagttctcttaggccaaccagagccaactgttaaattttcaggaattttgtgacctgattgttaaacatagccattattaaaatggttatataaacttacaattaaataaattatattgaaaataaatatctctagcatggctctagagatcttaacaggtggatactgctgtattcttttttttgagacggagcctcgctgtcccccaggctggagtgcggtggcgcgatctcggctcactgcaagctccacctcccaggttcacaccattctcctgcctcagcctcctgagtagctgggactacaggcacccgccaccaagcccggctaattttttgttttttagtagagacggggtttcaccgtgttagccaggatggtcttgatctcctgatctcgtgatccacccgtctcgacctctcaagagactgctgtattcttataccgtgcaaggataatggaaccctccctccctccctccctcccttcattccttccttccttcctttttttttttttttttctgaggcggggtcttactctgttgcccaggctggagtgcagtggctcaatcttagctcactgcagccttgaactcctggaatcaagcaattctctcatgtcagtctcctgggtagttggaactacaggcgcatgtcaccatgtccagttaatttttaaacttttgtagagatgtgatctcactgtattgccagggctggtctcaaactcctggcctcaaacaatcctcctgcattggcttcccaaattactggtattacaggtgtgagccaccacacccaatctcccatacattctatccaattgtatcttgaacaccactcatttcagcagtgaacattatttctagtatcctttccagcaaaccctctggtgcagggtcctataatatctgaaagacttaagcaactgtcactgcctggtgggttcctgattaccatactttaaatactgactaattcactctgggttgcaaattcaagttcattaatacacatttcctcctgcttcacattatttactctggagactttttttttttttttttttttgagacagagtctcaccctgtcacccaggctgaagtggagtggtgggatcatggctcacggcagtcttgaactccagggctcaagtgatcctccacctgagcctcccaagaaccgggactacaggtgcatgccacctatgccaggctaatttttatttatttatttttttgaggcggagtctcgctttgttgcccaggctggagtgtagtggcataatctcggctcactgcaacctctgcctcctgggttcaagtgattctcttgcctcagcctcctgagtagatgggattacaggtgtgtgccaccacacctggctaatttttgtatttttagttgagacggggtttcaccatgttggtcaggctggtctcgaactcctgaccttgtgatctgcccacctcggactcccaaagtgctgggattacagtcgtgagccaccatgcctggccttatcaggctaatttttaaagttgtttttggagagacaaagtctccctatgtttcccaggctggtcttgaacttctgggctcaagtgatttgcctgcctcagcctcccaaagtgctggaattataggcatgagccactgctcctggtcatgttatttactctgaagtactcttatagtaaacaacaacacatatgagatcataatgtctaacatcaccagtttatcccgaattttgttgcatttcactatttcttctgttcagcatcaaatgtagaaggtgggttgtgttttgggttcctatcattcaaaatttctgtaccgttaaaccctacaattacacatagtggaatgagacgttgtcaccatgagaggtaaaaaggagacaggaccccactgaggaaaccagggattcatgcctctgacctccagctcaccccaggatacacactcagtgatgaaataatcctaaccctaaattgcatgaattacattgttctccctccctgtccctttcctctgatccatctcttttgcaaaactcatgcaatctgagtgtgtttcatggtaaaattgtaatgtatacagttttcccatttgtgtttttatttgcaaactgacagccgcttaaccctggcactcgtggaaaatattgccttggaaaacgacctcacctgactatggcatccatgaggagcagtgaatgatactgataggggttaagacttgcttgcccctctgcttttgcacaagtggtgcctctgcctggaataccttgacctgcctcctgagctgtgtatccaaatctcagttctggcatccctccctctgtgatgccatcctggggatctccagcagagtcatcatggccttctttgtccctgccccttacatctgctgtgatacttttcctggaggtcaaaacacaaatacgtagaatgctcaatttccacagaaggctaagaaatgaaccaagtgggttgggggtgaagaaccgggaaccaaggcaccagagtgaactgggaagcctgtgctgggtccaagggtgcagctgctgctcaggcctggcctggtttctatgaggaatgtgggctcagggtagccagagctcctgatttttcaagagaactggaaatctgaactttctttttttgacatatgtctatctttaaaggcagttgttccagattttaaaatgactccattcagagttgataaatcacacacattcacagaataaatccactccacgggccaccagtgacagcccatgctctaggcaaaactctccggagtctgaggctctgtcctttctttctcaaattcccagtgcctggggcacggaacctggcatgaagaggcacttaggaaatgtttgttgagtgaatagatgaggcaatgaatcatcaggatattaaaattctttccactctgcatgagccatacatatagtgtaatttgtatatttatatatgctttccttcgggcccatgaacaaagccaggtacttgccaaagtgcaaaaaaagtttgatatttgtataacaataataaacccagggctgggcgcagtggctcacacttgtaatcccagcactttgggaggctgaggcaggcagattgcctgagctcaggagttcgagacaagtctgggcaacatagtgaaatcctgtatctacaaaaattaaaaaaaaattagccaggtgtgcatgcctgtagtcccagctacttggaaggctgaagtgggaggatggcttgagcccagaaggtgaaggttgcagtgagccgagattgcaccactgcactccagcctgggtgaaagagtaaaaccctgtctcgaaaataaataaataaataaataacattaaattaaattaaattaaaataggacaggcatggtggctcacacctgtaatcccagcactttaggaggccgaggtaggcagatagcttgagcccaggagttcgagaccagcccaggtaacatggtgaaactttgtctctacaaaaaaataaaaaaataagataaataaaaaaaaatcagctggacatggtggtgcatgcctgcaatcccagctactcaagaggctgtggcaggagggtcacttgagctcagaaggttgaggcttctgtaagctgtgactatgtcactgcattccaggctgcgtgacagagtgagaccctgtctcagaaaaaaacaaacaaaaagccagtaaaaataaaaataaaaagaataaacccagcagcaaggcatctgtcatcctctcatactggtcattataatttttggttaattcataaaactgctccacaaggtaggtcatattatcagctccattttacagaagaggaaaaatcggtaaagctcagatcaattcacctgcccaagaccacagagttggcaagtttcctgttatcctcaggttaaaagccaaagtctgtaaaatggcgctacaggatcccccttcactccccatagcccatctgacctcatctctccctctccttcattcaacacctgtctccctgacttcctcagacatcccacatgtgccctggcctctgggctttgtcactgaccctctgcgggggatgctgtcgcctaagacctttgcatggcttcctcttacctccttccagtctttgttcaaatgtcaccttttcactgagtactatacctgactcccctgcccacttaggatcacagctcccatcgccttctgtttccctcccttgtttcctttatttttctccatagttttttttttaatcaccttctaacatactatgtaatgtaattattcattttctgccttcaacactgtcaggttaaactccatgagggcaatatatatatatatatatatatatatatatatatatatatatatatatatatatatatatttttttttttttttctattttcttccctgctatatctctagttctagaattgtgcctggcacaatacgaattcttaattagaaggatagtaatatgtatgcagtcttttttttttttttttttttgagacagagtctcgctctgtcgcccaggccggagtgcagtggcgcgatctcaactcactgcaagctccgccttccgggttcgcgccattctcctgcctcagcctcctgagtagctgggactacaggctcccaccaccgcgcccggctaattttttttttgcatttttagtagagacggggtttcaccgtgttaaccaggatggtctcgatctcctgacctcgtgatccgcccacctcggcctcccaaagtgctgggattacaggcgtgagccaccgcgcccggcctgtatgcagtcttagagtggcctgtctgggctgaaatcctggctgtgccactggctttgtgacctgggagagtttattaacctcagtaagcctcagtctactcgtctgtcaaatgaggctactatactgcatttcaaccaatctaagaagccactgaaatacattattttagtgaaccactaagaaaaaagtcacgaattataaaagcccatcagatctaagactcctataggctttagaaatattttaagtaggggtgccagataaaatacaggatgaccagttaaatttgaatttcagattttaaaaaatgagtaatattttaggataagtatattctatttaaaatgtactactgggaggtgtatctatactaaaaagttattcatcattcatcttaatttcaaatgcaatcagagtcctgtattttatttgctaactctggcaaacctagttaaaagacaaaaaaaatgtatgttctagacccagtgaaatggtagtgtatgtcgcattaagagatgtaggttgaatgaatgaatgtaagaaaagtctgggccgggcgcggtggctcatgtctgtaatcccagcactttgggaggccgaggtgggcggatcacctgaggtcgggagttccaggccagcctggccaacatggcgaaaaaccatctctactaaaaatagaaaaattagctgggtgtagtggcgcgtgcctgtaatcccagctacttgggaggctgaagtagaagaattgcttgaacccgggaggcagagggtgcggtgagccgagattgcaccactgtactccagcctgggagacagagcgagactccatctcaaaaataaataaataaataaataaatagcctggcacatagtaggtgctcagtaaatgttagatgttattataaaatagctaggaccaggcacatagtaggttcagtgcctggcacagagtgggtactcagtaaatgttagattactataaaatagccaggaccaggtccataattcaacaggctaatatctactggcctgtagctccttgaaagtgctccctttgatccccaaggcttgccgaagagcttcttacactgaaagaacccagtaatacttattcaatgactagaggctccttttttgctcaatgaatggagaaacccccttttataaaaattcagtgacggcagagcccccactttgttttttaccccttttctacactgattcattcatggttgcagtcctttgaatgcacagtggggccactttgctgggaatagtctctgaagtctggagagagaatccttttagataaagcccccacaattagctcctctcctcatctgcctcctccacctcctccagaggctgctgccttctaggttctacctttgagagctcaggtgcctgctgccaattacatttccaccctacttgtgaaactactgtgtaattagcctaattacaggattgcaggcaatggcagcaggctgcctgggaaggggtattaaccctgcatttcccatgcacgttgcaagcactcagtgtctcaggactggggaggtaggctgcaggccatccacccaggttctgggtggccactcttgccaagttgttccttcttaatggccagaatattcgacagtcttttcagagtctgtccactacaaagcaacaacagcaacgtagtaatactagcagcacatactcagggccaaacattttcaacaggacagaagtaaaaagtgagacataaaagttgtctgaacctgcacacgtactccctgattctaaagtaaaagttgaaaaaagaaaaaaaaactgtctgaacattcatcacctgcattccagctccacaccccagaagtaacaatatctaaaataacaatacctatcaaatgtagacagaaatgttctacacacaagcaagctatatgtatagatgtagtctttgttctgctaatgtttagtctctctaaataataaaaaataagtcaaaaactaagtacaatgtgttttatatagatatagtcacccataaatgtctgttcaatttacttcgcacaatgagattatacaatacatatgcttttgtgacttgccctttgttgctaaataatatatcctatctgtctttaatgcctacatattagtgctaactcattcttttttataaggctgtgtaatattcaacaggaagaacgtgtcataatttatttaactagtcttccattatgaagcatttagattgcaaacagatttatgccataaaaagaatacataatcccagcactttgggaggctgaggttagtggattgcttgagcccaggagtttgaaaccagcctgggcaacatggtgaaaccctgtctctacaaaaatacacatacaaaaaaaaaattagttgggcatggtggggtgcgcctatagtcttagctactagggaggctgaggtggaaggagcttagaagatcaaggttgcagtaagctcagatcgtgccactgcacttcagtctgggaaacagagtgagaccctgtctcaaaaaaaaaaaaaaaaaaaaagtgcatgaagccacacaaataagttcctggtgcttgtgaaggagatgagggtgggaggcagcttccaaatagttaggtgtggtccaagaagcaggggtagagagatccactataaagctgcgtgttaaccctttagttagttgctggatcctaggaagccctagatgattccagggagaggcattgaagggcagctcttgaccaaccagtatggaaaccgtcctatattttaactaccagtgtggtcttcctggtcacagctcttgatgttggctatatttgctatatttgagtatattcacaggtttccaaccctagaattcttgggtcaaatggtataaactcttttagtcttaatgagtctgttatcaaactttctcttggagtcttttttttcataaaaataaaacagtaatagtaatagatggcatttatgagagcaaagcaacatactaaaggctttttatacttgatgtcctgcaattttcccaagagggctatgccacaggcacttttatccccctcattttacagatggggaatctgagactcagaggctaatgacctgccaagtttcacacagcaaatcagaggaggtgctgcgattccaattcatttccataaggccctgaaaccaccatcctactggctttctaaatcttattgagctgggacggtggctcatgcctataatcccagcactttgggaggctgaggagcctggatcacctgagggcaggagtttgagaccagcctggccaacatggcgaaactccgtctctattaaaaacacaaaaaattagctgggcgtggtggcaggtgcctgtaatcccaggttaacaggaggctgaggcaggaaaattgcttgaacccgggaggcagaggttgcagtgagccaagatcacaccattgtactccagcctgggtgacagagagagactctgtctcaaaaaaaaaaaaaaaaatcttattggaacgtgaagatcaggaaggaggcccacagtctttccactgcagggtccatgagcacacctgcttacatgtgcaaagacacacttagatggagatggagagaagaagctaggatgaaaactaaagatggcaaaaagagaaattaatatcaggtcactgtcaacagaaatttgtgtcacagtgaatggcacttctaacaattggctacacaacctaggccttttcaggcctcagatttctcatcagtaaaatgggaatgattatccaatccagtagaactgttgagcagaattgagttaatccatatgaaatgcctgaggcctggtaggacaattcacagttactgttaaggtatctgcaatgagaagaacatcttaaactcttgacagcatagttctataatatataaccaaggaggaggattgccctttaaaggtctgtcattcccctcaacaatccagcaacagtcctgctccaaccacattaaaactagtccaaaaaatttccccaatcctgtgaataattatttaccattagaaaaatcagagatcctgactgggcgcgatggctcatgcctgtaatcccagcactttgggaggccgaggcgggtggatcatgaagtcaggaattcaagaccagcctggccaagatggtgaaaccccgtctctactaaaaatacaaaaaattagcagggtgtggtggcacgcacctgtaatcccagctactcgggaggctaaggcagaaaattgcttgaacccaggaggcggaggttgcagagagctgagatcatgccactgcactccagcctgggaggcagagtaagatctgtctcaaaaaaaaaaaaaaaaatcagaggttgagagcagtggctcacaactgtaaacccagcactttgggaggctgaggtgggcagatcacttgaggccagaagttcgagactagcctggccaacacggggaaatctccatcgctaccaaaaaatacaaaatattagccaggcatggtggcgcacacctgtagtcccagctatttgggatgctgaggcaggagaatagcttgatcccaggaagcagaggttgcagtgagccgagatcatgccactgcactccagcctgggtgacagagtgagactctgtctcaaaaaaaaaaagaaaaagaaaaagaaaaacaaatcagaaacatatggttaaattaaaaaagacaaagatgaaaattaactgtaatgcaatctacggtactgttaacattttgacatttatgttgatatacatttgtatttatatacttttaaaagtcccaaatgttctgtcttattgcacattctgctggggggctgttttttctctccttccaggccattctccactgtctgaccatctcatgccttggaatccggcttttgggttttgggcagctcccacagccctcactctctttaactgaaacacaaggtccacacgttttgaaaggttttctttttttttttttttgagatggagtctcgctctgttgcccaggctggagtgcagtggcgagatctctgctcactgcaagctccgccccctgggttcatgccattctcctgcctcagcctcccgagtacctgggactacaggcacgcactaccacgcctggctaatgtttttgtatttttagtagagacggggtttcacagtgttcgccaggatggtctcgatctcctgacctcgtgatccacccgcctcagcctcccaaagtgctgggattacgggcgtgagccaccgcgccaggcctaaaggttttcctttctggccttcttctctcaccattttctctctgcttgtcaggtctttgaacagcctaacctgctttccttgctgaatcctggtaggtaccgtgggaatctagcttctttactctgggggtcctggggcccccctttctgggcagctgtctctgtacccccatcccctgtcatcacctgatcacacttcattgtactgattggataacacctgctatggattgaatgtgtcccccaaagttcgtatgttggaaacttaatccccggtgcaacagcattgagaggcagggcctaaacaagaagattaggtcaaatgagggctctgccctcatgaacggattaatggtgtaattgtgggagtgggttagttatcaaatgagtttggccgctcttgctggctcatacttttttgcctttttggcttccactatgagatgacacagcaagagggctcttgccagagccttaaatcttggctccagagccaagagccaaacaaatttcttttctttatcaattacctcctctgttgtatttgttatagcaacacaaaacgaactaagacataatctgtcagtctccaccactggtctgtgaactacatgaaggcagctggccatgttatgatgagccaaaatatatcctcaatgtctagcataagtgcgtggcatgatgtgctcaatacgcactcactgaattaatgagcaaatctgtgtgatttttacttactatagaacctgagcatgggacgtatgtgtctttacattccatgagacaggttagggtgggagagtaaaggattgacctgggaacatgcttcttcactgggataccttagaacctagatcatgggctttgctgtctctcaagaatcatgcaaatgacaaacatcactgtgactcccagtattgtgggtgctggctggagttcattccagcaaagagctagagaaacaggaataatattactcattactattgtgcttagactttctatacgatacccagattctacaagtattgcacccagttgctggtgcacagaaaccagagtttcaaccacattgctttgcacagacatttcttctgcagttctcattaccacttttacttaaaaggcatgcaggctgggtgtggtggctcatgcctgtaatcctagcattttgggaggctgaggcaggtggatcacgaggtcaggagatcgagaccatcctggctaacacggtgaaaccccgtctcttccaaaaaaaaaaaatacaaaaaaattacccgggcttggtggcgggcgcctgtagtcccaagtactcgggaggctgaggcaggagaatggcgtgaacacgggaggcggagcttgcagtgaaccgagatcgagccactgcactccagcctgggcaacagagcaagactctgtctaaaaacaaaacaaaacaaaaaaagacttgcaaacagatgtcttgtttagttttgcaaatatttgatgtgcagtgggatactgaaattaacatcaatagagtcaataggcagagaacattaagaaagtgtttgtagatgtgcaggaaggtttacgcatgcatgcatgcgatttcatgggtgagaaaaagcagagccatctgaagtggttgagaatgtgttttcctccacaaaagaggtgtgatctgagagaacaaaatagaaacccctatattgactaagatgaacgcaaagattaaggaaacaaagttacctatgagtggagggctcagggcctggctggcatggcacgtttctaaaatcctatggctgcaagaaaaaccacaactgctaaagttcctaacaataggcattaccagatctctcctaactttgatttataacccagatgactacagctctgattgaacaaagacctcaacaaaattcttttctgataagttgctgcagatttttaaccagtttcagtcagcttgtagaggctgtgcacaaactgtcatgtcctttagtttaccttttgatgtaaagaaccaaattccacccgattttagtgctaaaacataggatgtgtgttacatacatttgatggctgattgctgtagctaggacttccagtactatgttgagtaacagtggtgaaagtggacatcctggtcatgatccagatcttagaggaaaggctttccatttttccccactccgtataatactaactgtgggtctgtcatatatggcttttattatgttgacttatgttccttctatcccccttttttttgaggcttttttttttttaatcatgaagggttgttgaattttgtcaaatactttttcagcatcaattaaaatgatcatataatttttgtccttcattctgttgatgtgatttgtcacattgatttgtgtatgttgagccatcttgcattccagggataaattccacttggtcatgatgaattatctttttaatattttgttgaatttggttcactagtattttgttgagaattttggcatcaatattcatcagagatagtgacctgtagtttccttttttctggtatgtctttggttttggtttcagggtaatactggcctcatagaatgagattggaaggattccttccttttttattttttggaatagcttgagtaggattggcattagttctttaactgttttgtcaaattcagcagtaaagccattgggtcctgggcttttctttactgggagtaaattttttattattttttattatgactttgatctcattgcttgttattggtctgttcaggttttggttttgctcgtagttcaatcttggtaggttgtatgtgtctaggaatttgtccatttcttctacatttttcaacttattggcacatagttgctcacagtagccactaatgatcctttgaatttcggcagcatcagttgtaatgttgctttttgcgtctaattttgcttatttggatcttctctttttcttaatctggctagaggtttgtcaattttgttagcttttcaaagagtcaatttttttatgtcattcatcttttgtattgttttcaacacttcaattttatttatttctgctctgatctttattatttctttttttctactaattttgggtttgattgctcttgcttttctagttctttaagatgcatcattaggttttttgtttgttgtttgtttttgagatggagtctcgctctgtcgcctaggctgaagtgcagtggtacgatcttggctcactgcaaccttcacctcccaggttcaagcaattctcctgacttagcctcttgagtagctgagattacaggctcctgccacaacgcccggctaatttttgtatttttagtagagacagaatttcaccatgttggccaggctgctctctaactcctgacctcaagtgatctgcccgcctaggcctcccaaagtgctaggattacaggtataagccaccatgcccagcctcattaggttatttgaagtttttcttctttttctgatgtaggcacttataaaagtccctcttagtactgcttttgctgtatcccataggttttggtatgttgtgttttcattatcatttggttcaagaaatatttcaatttccttcttcatttcttcattgacccattggtcattcaggagcttattgtttaatttccatgtatttgtatagtttcccaaactcctcttgttattggtttctagttttataccattgtggtcagagaagacgactgatattatttcaatgttttttggatgttttaagacttgttttgtgatctaacatatggtttatccttgaggataatctatgcgctgaggaaaagaatgtgtattctgcagctgttgaataaactgttctgtaaatatctattaggtccatttggactacagtgcagataaagtctgtaagatctgtacaatgctgagaatagagtgccgaagtctccagctattatcgtattggggcttagctctctctttagctctaataatatttgttttatgtatttgggtgttccagtgttaagtacatatatatttacaattgttatatcttcttgctgggattgatccctttatcattatacagtgactttctttgtctcttcttatactttttcacttgaaatctattttgtctgatataagtatagctactcctatactttttttggtttcaattggcatgcaatatctttctccacctctttatttttattctgggtgtgtctttttatttatttatttgtttttaatttttttgagatgaagtctcgctctgttgcccaggctggagtgcagtggtgtgatctcggctcactgcaacctcagcctcctgggttcaaccgattctccttcctcagcctcctgagtagctaggattacaggcgccgccaccatgcctggcaaagtttttgtatttttagtagagacaaggtttcaccaatttggccaggctggtctcgaactcctgacctcaggagatctgcctgcctctgcctcccaaagtgctgggattataggcctgagccaccacgcccagctctatgtgtgtctttggaggttaagtgtgtctcttataggtaacagatcattaggtagcagatcattaggtctttttttttttttttttttttttagttgataggtaagaacttactcctggcattttgttctttgttttctggttgttctgtggtttttctttttctttcatgcttgtctttttttttttttaatgaaggtgattttctttggtgatatgatttagtgtcttgctttttattttttgtgtattcattgtatgttttttggtttgaacttatcatgaggcttgctaatactatcttataacccattattttaagctgaaaacaatttatcactgtttgcataaacaaacaaaaagagaactaataaagactccacaccttaactttttccacttttctttttaactttttgttgtttccatttatcttattgtagagtctgtgtcttgaaaagttgttgtacttattatttttgattggttcattgtttagccttcctacttggcataagagtagtttacataccacaattacagtgttataatattctgtgttttttgtgtacttaccagtgagttttgtaccttcagatgctttctcattgcgcattaacacccttttctttctgatggaagtactcccattagcatttcttgtagggaaggtctggtgttgaggaaatccttcagcttttatttgtctgggaaagtctttatttctccttcatgtttgaaggatatttttcctggatatactattctagagtaaaaggtttttccttcagcactttaatatatcatgccactgtctcctggcctgtaaggtttccactaaaaagtctgctgccaaaggtattggaactcaattgtatatttgcttcttttcttgtgctgctttttaacatttcttacttatccttgacatttgggagtttaatgattaaatgccttgaggtagttttctttgggttaagttggcttggtggtctataaccttcttgtggcaggatattgatatctttctctaggtttgataagctctctgttattatccctttgaataaactttttacccctatctctttctctacctcctctttaaggccaataactcagacttgtccttttgaggctattttctagatcttgtagtcatgctttgttgttttttattcttttttttttggctcctctgatgtgtattttcaaatagcctgccttcaagatcactaattctttcttctcttaatcaattctgctgttaaaagactctgatgcattcttcagtatgtcagttgcattcttcagatccagaattcctgcatgatcctttctaattatttcaattatctttgttaaatttacctaatagaattttgaattctttctcttttttgtttttgtttttgagacagtgtctcactctgttgtccaggctaaagtgcagtggtgcaattatggctcactgtagccttgacctcccaggctcaagcgatccttccacctcagcctcctaagcagctgggactagagttgtaaaccaccacgcctgcctaatttttaaatgttttatagagacagagtttccctattttgcccaggctggtctcaaagccctgggctcaagcgatcctcctgccttggcctcccaaagtgctgggattacaggcatgagccactatgcctggcatccttccctttcttatcttgaatttctttgagtttcctcaaaacagctattttgaattctctgtctgaaaggtcacatatctctgtttcttcaggattggtcctgggtgcgttatttagttcatttggtgaggccatgtttgtctggatggtattgatgcttatagatgttcttaggtgtctgggcattgaagagttagatatttattgtagtctttacagactgggcttgtttgtgcttgtccttgggaaggctttctagatattcaaaaggacttgggtcttgtgatataggttgtgtctgctttagggggcccaaagctcagtaattctgtggttcttgcagatttgtagaggtatcgccttgatggtcttagacaagattcagtagaattctctggattaccaggcagagattctaattctcttctcttaccttttcccaaacaaatggaaactttctgtctgttttgagccacctggagctgtgcataggctgatacaagcatccctgtggccaccaccgctaggactgcactgggccaggcctgaagccagcatagcactgggtcttgcccaagacctgctgtaaaaagtccctggctaaggcttatgttcactcaaggccctggggctcgataatcagcagatggcaaagccagccaggcttttatccttcccttcagtgtggcaagtagccccaggccccgggcatgtccacaggtgctgttcgggagccagggactagagttgaaaaccttagaagtctacctgttgttctatcgtactgcagctgagctggcacttcaccacaagatgcagtccttcccacttttccctctcctttccaaaggcagaggagccttaccacatggccgccaactccacggacccacagggagtactgccagattggcattgtgttcccttagggcccaagggctcttgggtcagcttgtggtaaatgctgcctggccagggactctcccttcagggcagtgggctcccctctcctctcacccaggtcaggtacagaaatgttgtccaagagccaagacctggaatcaggaatcccaagagcccacttggtgacctatgccactgttgctgagctggtacctgatttttggttcttatgaagctgttttttaaattttgtgcagatagttgttaaattggtgtccttgtgcggggatgatgagtgtagcattctattcctccatcttgctccactccaggtctccctagagattatttaaagtatacaggaggatgtatgtaagttatatgcgaacaccataccattttatatcagataattgagcatccatggattttggtatccttggaggattcctggaagcaatctccatggataccaagggatgactgtatatgagatcatattataacaaccatttggccaagtgcagtgcctcatgcctgtaatcccagcacttggggaggctgaggcaggtggatcacctgagattggtagttcaagaccagcctggccaacatggtgaaaccccatctctactaaaaatacaaaaaattagccggacgtggtggcaggcacctgtaatcccagctacttggaaggctgaggcaggagaattgctcaaacctgggaggcagaggtcgcagtgagccgtggtcatgccattgcactccagcttgggtgacaagagcaaaactctgtctaaaaaaaaagaaaccactttctctgtgttttagtcaaagacattatgagcacctttcattaaatattctttctttcttttttttttttttttgagacacagttttgctctttttgctcaggctggagtgcaatggcacgatcttggctcactgcaacctctgcctcctgggttcaagtgattctcctgcctcagcttcccaagtagctgggattacaggtgcctgccaccacgtccggctaattttttgtatttttagtagagatggggtttcaccatattggccaggatggtctcgatctcttgacctcatgatccacccgccttggcctcccaaagtgctgggattacaggcatgagccactgcacccagcctcattaaatattctttactccagttcttagagctatctagtattctgttttatggtgggctacaatatgttattccttcatcgtaaattatttaggcagttttcaatttttcactatttattacagttcaatttggtgtttaaacacatctgtttaccagatgaaatagtacttgggaaaaagctttatgaaaatttacattattactttcttgttatttccattgttgttggcttatttgactatgttactcgttttgccctggcccaatggaaagtgctttgagggtgaagacagttccttaattcctgctttgaggtgtgccatccccagcacagcattgaacataagacagatatttcatgggagcgatcagatgggatggtcagtgatgcctggtcaattgcaacagactcgtactcttttgaaaacattgatcacagtgtatgtccttttgttgagatgaagtctcactcttgtcgcccaggctggagtgtaatggcacgatctcggctcactgcaacctctaactcctgggttcaagcaattcttgtgccccagcctcccgagtagctggaattacaggcatgtgccaccacacctggctaatttttgtatttttagtagagatggggtttcaccatgttggccaggctggtctcaaactcctgatctcaggcgatccgcccaccttggcctcccaaagtgctgagattacaggtgtgaaccaccgcgcccagccctagtctatgttccttttaaattaaaagtatttaggaaaacattttatatattttaacttttttttttttttttttgagacagagtctccctctgtcacccaggctggagtgtagtagtgccatcttggctcactgcaacctccacctcccagttcaagcgattctcctgcctcagcctcccaagtacctgggactacaggtgtgcaccaccacacccggctaatttttttggtatttttagtagaatctggatttcaccacgttggtcaggctggtcttaaactcctgacctcaaatgatccacctgcctcagcctcccaaagtgctgggatcacaggtgtgggccactgcgcccggcctattttaacttttaactgtgcatcatactcattcagaaatgtgtacatatcataaatatacaacccaataaattatcacactgagcatgtgtgggtaattggcagctagatcaaaacaatatttcagcaccccagaaaatcccctttgtagtccacacttaagttcttggttttgtttgattttgttttgtttttgtggtcattgcaggtgctttggattttagttgcgttgttcattttcttaatttttcagattcagccttagcaaatggaatcttgcttatagcaagattgtcagttactggtaaaaggagctctggggcccagcgcggtggctcatgcctataatcccagcactttgggaggcaaaggtaaatcacttgaacccctactctacaaaaaattaaaagaaattggctgggcatggtggtgcgcacctgtagtcccagcagctacttgggaggctgaggtgggaggatgactcaagctaggaggtcgaggctgcagtgagccatgattgcaccactgaactctagtctgggggacagagcaagaccctgttcccccacaaaaagacagtcaggtaggcactggagggaacagcatcccccaaagtggctccaagcaagggcaaaagctctgaagtcagagccaggctttgggccacattgagggaatgcgaatgagaccaagtggctggagcccaaagggccatggggaggaggctggaaatgagacggaatagatgcttcaggcgggcaggtgaagagacagatcttggaggcactcaggttgtaggaacgtttatatttactctgagggaaatagggagccatgggagggatgggagcacaggagttatatgacctggcttagatcattaaaaagatcatcctggccgctactaaggtatttactgggggtaagaatggaatcaggaaaactagtttggagcctgttacaacaatctgaatgggaaaagatggtcctttttctgatatttattgttgtttaacaaactacttcaaaacttctggcttaaaacatcaatggtttattatttttcatgattctggaggcttctggcaattctgtgcttcgcgagtattggctcagtcatattgtctcccttctttgcttgcctggtaatttttatttttttatatttatttatttatttatttatttagaggccgagtcttgctctgtcgcccaggctggagtgcagtggctcgatctctgctcactgcaagctccgcctcccaggttaacgccattctcctgcctcagtctcccgagtagctgggactacaggtgcccgccaccacgcccagctaattttttttgtatttttagtcgaggtgagatttcaccatgttagccaggatggtctcaatctcctgactttgtgatccacccgcctcggcctcccaaagtactgggattatcggcgtgagccaccgcgccaggccaattgtcttgtaatttttaaagaactgtttgccagccaggtacggtggctcatgcctataatcccagcactttgggaggctgaggcaggaggatggcttgaggctaggagtttgagaacagcctggacaacatagctagatcctgtgtctattaaaaaattataatttttaataaaaaattgtttgccaggaatgtattttactttgttgggtgcaggatattatgtttctgtgaattatctcaagttctgttctgggatgcagttaagttccttggaaatagtttgatccttttagggtgtaagatgtgttaagtgggatcagagcagtgtttagtccagagctaattattctccactactgaggcaagatgcttctgagggctctgcccagtgccttgtgaattgtgagattgtccaggctgcctgcgtgagctccaatactagttcctctaatccaatgctctaattcaagaaaatatgacagagttcattgttgtgaagcagagttgcccaggaagcccacagaatcatgagaaataataaaaatttgttaaataataaataactgaaaaaaaaaaaagagctggatccaggtctttgcacaacctcaggtaggtgttgctagtgtgtgccaatcagagctcagctgaagacctctggtgggccctttgccgatctctggagctctctctctgcagtattttgctctctggtatgctgtccacctgaattccctcactgcctcagtctcccctgcctctcagcttcatctcaactcagagagagcctgtcctgaccctcctggacatgttgagtttaatgtgcctcttaccatactagtgaagattccttgaaatgccgtctggaagaggtcccttataaacaaactcctggatttcataactcagaaaggggaaaccaaacatcgtatgtcttcagttataagtgagagctaagctatgaggatgcaaaggcataagaatgatgtgatggacattggggactccgggggaagggtgggagggggtgaggggtgaaagacacattgggtacagtgtagactgctcgggtgatgggtgcaccaaaatctcagacattaccactaaataacttatacatgtaaccaaataccacctgtgcccccaaaactattgaaaaaaaaacaacaacaacaaaaaagtcctggacttcaattgtccaaggtgagtcaaagactcaggcaaatctcctacggaatgtcaggttgtctatcaattgattgccttgtcatttgggatctgatattgggatcaaattggcatctgtaactcctcaagttatttcaagtactgggtctttgatttggtctatgagccacaaaaccttgtctgtctccttcctgtttagctaaaacaaacaaataagtagtgattctgataatcccttatttaaaaagtacacgtaacatgtaagagattttacttgtgacctatgagccgcattattatttgttattagtagtagccgaaatgctgacattgatgaatgataggcttttcaaaatattagttagatgtagttagtgtgttcttataataataacactcactcatcagcttcagtgttagccaggactcttgcttgaaaatcatggaagtcaactgagagtaatttaagaaaaacttctacaacaaatccccctacagaaatgaaatttagaggcccatttagctcaaaagcctaagacgtagggcctgattcagtcttcagatctctctccttccctgtcgattctgtttccttctccctatcttcattttcagcctggtgggaccagatttacgtcagccttaaagttttgatctctaaataaataaataaaagaataatttctctgatatctctggcaaagtcctggggcagggggaatctcaggtgcctaggcttaggtctcatgcccctccttgctgtggggtcagaagagggtaagcccacagggtcatgtgacttcagcaggcttcccacggagtgggctttttcatccctggcaacattgatactctgggctggatgattgtctgttgtgaggctgccctgtgcattataggatgtttagcaacctccctggtctctacccactaagataccagtagtacctctctcctttccccatagttgtggtaacgaaaaatgtctctagatgttgccaaatgtcttctggtgggcaaaattgcccccattaagaagcacttctatgaagcaggagtactttcctttgggtagagatgctgggcaagacagggcaggatggctaatgcctagagtcccaacactttgggaggctgaggcaggaagatctcttgagttcaagagttggagaccagcctggggcaacatagtgagaccttgtgcctactaaaaataaaaaaaaaaaaatagccaggtgtggtggtgcatgcctgtagatgagctacttggaaggctgaggcaggaggattgcttgagcccaagagatagagcctgtagtgtgctgtgattataccactgcactccagcctgggcaacagagtgagaccctgtctcaagaaaaaaagaaaagaaaagaaaaaaagagaaaccgggtaggaagacaggcccaccacccaagtcaatgtgttttctgagcaaagcagaaggagatggatctacagatgcgatctgtactatgaacaatttcagtggctgcaacgttgtgcagtgctttaatttctcacaaaataattttgggagagggttcataaaaactgggaaatacctgtgaaaatgtgagattaatgtaagtatcgtagcagaaccagaataaatgaaagctctctagtgtcatgatgaaaactattaactattactattaactattaactaagactgtgtctgattcattgcttgtaacacaatccttgaaactgggtgatttataagaaacaaaatttactccttacagttctagaagctggttgaggagagtcatctggtgagaggcttcttgctgatggggcctctgcagagccgcaaggctgcacagggcatcacatgatcacatggcacaaaggctgagcattctagctcaggtctctcttcctcttcttataaagacaccagttccactcccataacaacccattagcccattaatccatgaaagaattaattcattcatgaggacagagcccttgtgacctaatcacctcttaaaggtccaacccctcaatactgccacatcggcaattaagtttcaacaagagttttggaggtgacgaacactcaaaccatagcagactgaaataccaagttttattttggctcaatattgtactaggtacatgatcattcttaaattatttaatctttgaaatcattggtttcctccagtataaaagatgataaatgatatcaggcaaccaattgctgatgtatgtgaaactgtgaagtactaggcaaatggaatattatttaaacatactcttcaattagttgaatatgaaagctactttggtgacttctgattttttagaatcagaaaatttcctcccttcctttcttcttccctccctcttccctccctccctccttccctctgtccctccctccctccttctttcttcctccccatcctcctccctctttgtctcttcttaattttttctttcatcttctttttggcttgttggttaatgtagagatataagtgttgtaacaaataagttactattattttctagtatgttccaagaagcaaaaaaaaaaatattgcttgcctgatttattaccagtttattctgttcctgctgttaaaaaattagggaaaaaaaagggaaaggaaagaaaaacatttccagttcgttgagctaactggtgggtgagaggctgagaaatgataccatccttgcgaaggcagatattatgtcccaagagcacacgatgtgtatgttctcaaccttctggctctgttccaccttggtaataatccaaccagttaattccgtgggacttaagcttctggtctttgtctgaacaaatcagaaattgccagaaaatgttagaacaaattgtagatcccagttgtagtgaagggtagaatatatcccagaaacaaaacaaatgacttaatccattgtcagatgtgggggctctatgattcatcccttaaaagagaattatggtagggcttacttcccaagtgaaagaaagacaatgtgctcttccatctaatccgattgtaggaaaatttcggaatgtcaccttttagagtaaacattgcttgactcttagattaggtctgtaatttatggtgcaggatctcctttagagttttcagtaaagaatgctgtatttgttccttttctgtttgcaaaaataggcgtttgggtgtgacatcccttagggtgatcattatcagtggatcattttacatattcttgtgccaattctaaaataagcacatatatttctcaaccagttgagtatctcctaaatgatgctttcttctcagtgggaagctttggatacttatgaaaaaaaaaatcagagttctttaagttggagagtccacgctgatattcatcacaatttgcatttgaatagtacaaactacaggaaaccatggttggggggggaggtgaaatttttattatgtgcttggcgaggagtctctgagtgtttatagtttgggaacggatactagcagaaggctttctgttgttgttagggacggctcacattcccttcccacccactcactgccatctacagctcagctttggagtcagaatagcacttttcctacgtttagtaggactaagaaagatttttttttctccccttggcatattcctgcagctggatattagggaagcaaggaagctgttgaatagctttctagctaaccacattcatagtattctttctcatcttccttcagagtttctgtttagttttgttctgttctaaggacctatttcctctctaatgaaattttcgtaggaccctgttgtttgaatgtttgtttctggaccctttgaggtttctttactggcattgttattttgattggagagccaatttgctatctgtgaacttttgcagatgcgtgaatcgtgagtgagatagagaggtgacatatatttgagtgtgtggtatgggggagagaaagagtcactttttgtgctcttccgggcacgtcttcaaacacaccatgctgtcccccacacagtgagtagaattatcccaactgtttttaagttttaaagtgctaacaaacagaaaaaacaatgaaaataattttctcttcaaggatctctgagaactctggccacacctcattcttaaaagcataatatgtgagtgactaggacagaattctttccctggattcccttagagaatgtctcacgaaataacgtctcatggcaatgaatcatcggctcaggatccgaccagtaagccactggccacatttctatttttaagagtcactaggaaaagttggaaataattttagaaaataaagaaaatactctttggcctttctttcattttcttttcatttggggagtaagtggagaatgggggaagagatctcatgtctttgattcatgtaaagccaagttctggaaatatagcaaacgcaggagaactctttcttaagtggtaggaacagtcctaattcccacagtttaggttatctggtctatttcaaggttttggtgcgtgaggtttggtgtcaacagcatgatatgatctgtggtatacttagggttcccaaatatgaatgtagaagcattgaaataatttattttattggatttgaattcactaaatatagcccttgagtcatgtataaaatctcattgttctaatatgaaacaaatgctgagtttattgtcaagcctaattaacatgtcatgaacatggggcacctgtaaatgatagaatctgagttaacaacagctctctgactgtgtgcacgggctgtttggagggcttcttcatgctcaaagttcaacggcatttagagtttcaacagttcactgcttcaatttttgtttactttcgtttcccctgggcagaactctctaatctgggtttaactttttatactatacttgtgagaggtgctcaaattaccctactccaataatagcatactcttcatatgggaaatttgaaaagtgcctctgcccactctatacagaatttcctgtgctgtacatttatcctgctgagacaggaaacacaattattgtttggaattaagctagacccttgaggaacatgaagttctgcttatggtttccccacccccctccatcatcagacatgggtgttgttttatcagaaataaataaaaacggataatgtagctacaaatagctacagggaaggaaaaatctatttgtaagatttttattacttgtgcctaaataagatggttctctgaacatttgctgactgtttacaagagaaaaataattattcctggcttgtaagcctgtcaggccatcacagaagaaggtacaaactatttccacattttttaaccccctcagtttctctatgattattcgttgactattttagctggtgacacaatgaaaaaacagagtctaagcaatttctctaggaatcaagatttatctgcattttttttttttttttttttttggccagagtggcgtgatcttggctcactgcaacctccgcctcccaggttcaagcgattctcgtgcctcagcctcccaagtagctgggattacaggcatgtgccaccatgttcagctagtttttgtattttcagtagagacggggttttgccatattggccaggctggtcttgaactcatgatctcaggtgatctgcccaccttggcctcccgaaatgctgggattaccggcatgagccaccatgcccgaccttgcatctttggataatcaaatattacctcttcagaaaagacttccatggaagccccttatgaaatactgccagagccctcacctcccatatggctccattttcttgtcctgttcactttcttcaaagcattcatcactatgaagtattatattaatatatgtattatttactagcttatacacctctaggacagtgctacccaacagaaatataatgcaagccacacaggaaatttaaaattttctaggagtcatattaagaaagtaaaaagaggtcaggcgtggtggctcactcctgtcatcccagaactttgggaggccaaggcaggcagagagcttgagctcaggagttcgagaccagcctggggaacatgatgaaactccatctctactaaaaatacaaaaattatactagctgggcatgatggtacacacctgtagtcccagctactcaggaggcttatgtgggaggatcgcttgatctcagggaggtcaaggctgcagtgagccgtgatcataccactgcactccggcctggatgacagagtgagacctcatttcaaaaaaaaaaaagaaggtaaaaagaaaatgaatactattatatttattataatagtagtgtttcattaaacccagtatgtccataatattatcattttaacatgtaatcaacataaaataattgttaatgagatattttttattcattttttgaactaagtctttgaaatccagtgtgtgttttactctcacagcatatctcagtcccgaccagccccattcaagtgctcagtggccacttgaggcctgtggctaccatatcagcctgcgtggctcatctataaactccaggtggtcagcaactttgttttgttccctagagcattgacgcacacacactaaagacatagtaaatagtcaatgaagtagcaaatgaatgttaaaattataaagaccacaactgtttagccaaaggtctgtgtattcaatgccttccagcatgttgcaatgactgtagtttttctctttttcctaatgtttccttcttgcccaccaatctaagaatatcaaaatgcaaagaatgtcactatgatcatttgttttgtcattgaactagtttttctgggaaaagccagataccatatcccgtggtgactctctgcccacacacccctctgaatggattcattaaagttccattcttgcatattttttcctcttggctctatgttccatccctttaatcaattcttgagctgcttaattagcaatgattcaaaacattttttaaaagatcacgcatccgttgatattttgccagcacctccttcctttcatcaaggccaataaacaaaaatgcatttggcgccttctttgtgccagataccattgcagtaggaactgcagatatactttagcgtagcgaagaccccagtcctctccctcagtccagtggggagaaagtcagtcattacgatgaggatgaggagagtctggtggtacagacacgagctctggtgatggacaatggaggttcaaatcctggtgctgccacttgcagctatatgggcttgagcctgtcacaatatatctctagcccttagtttttccatctgtaaaatggggataataatagtatgtacaggtattagtcaatttttacaccgctataatgaaataacagagactaggtaatgtgtaaagaaaaagaagtttaacggactcacaatcatggtggaaggcaaaggaaggcaaaggcacgtattacatggtggcaggcaagagaatgtgtgcaggggaactgccctttataaaaccatcagatcttgtaagacttattcactatcatgagaacagcatgagaaaaacccaccccatgatttaattacctcccaccgggtccctcccacgacacatggggattataggagctacaattcaagatgagatttgggtggggacacagccaaaccatgtcagtacctcatagtgttgtgaggattaaattatacatatgtgttctgtggtgagcaggtctacgcaaacctaccccaaaagtcctaagaagctaaaagaccaaagaaagtggctgacacaacgattttcttggaaaataacatttcatagggacttacaaacagaaaacatgtttgtgtcttgggtggtggtgagacaagatggtggatccttgtgtcattatccccctgacccagaacttctatgttatagggaaaggtgactacaaagggatgtttagggcaattgaagtgcaataacatctagattgtttgacctcagggcagaatttacagtaactacctgctcttacacaggaacaatagacaatctggaaatcttggaggccttctggggaactagggttaatcagaagtcaacatgtcgggttagcttccaagatggcgctgctttagcctccacaatacgtgtctttgttactgattgtctttattacacattataacccctgttaaggggtagccttggctcattgctagcagtggttaagagacatacatatctaatacataaaagtaatgacaaaaaccacaattacttttccaccaacctaatgttaatattaaaacatggccctttagagcaattcacaaggcacactagccctgacactgatgggtcaggtgacatttcttaggggaagcaccttctcaactgaaagccggtggcgagtccaagttggctggataaaacgtttaagcgggagggaagagtgtgtgcaaagacccgggatgaggaactattctggcagtttaaggaactggaataagtcaagcctggctgagacacaagctccaaagcctctgggaaccaggtagaatatattagggtgaatcatataatactcaacaattttcagactataagaacagcgattacctacggtttagcctaagaggatggctaaagtgtgctgtgtgttaaaaacaaaaatgtaaaccacaacaacagcaagttccttgataaattgtggggcaggaaacattgggtctcaatgagcagccgtggccacttgggctggcggaacatgtggagtggagcacctgtgcaaagggtggccccagtgcattgccaccacagacgccctgtgtgactaaatactcagctatgtgcatttttaaagggaagtccaaaaataacactttataggttgtcttttgattttaaaatgttagtgtgctctctctctctctctctttctctctctctccctttctcttttggctaggggagcagagtagggaccagagtatttgcaggctgaatgtggcccctaaactacttgaagccaatctttggctcagagtttagactaaggtgggcaggaatgaggcaccttctgatttttttaatttttaatttttaggagcacctcgttgaatgatttttttactttttcttgctctgcttgaaatcttttccttttattttttgagacagagtcttcctttgttgcccaggctggagtgcagtggcaggatctcagctcactgcaatctctgcctcccgggttcaagcaattcttctgcctcagcctccgaagagctgggattacaggcatgtgccactatgcctggctagttgttttttttttatatatatatttttagtagagacagggtttcgccatgttggccaggctagtctcgaactcttgacatcaggtgatacacctgccttggcctcccaaaatgttgggattacaggtgcaagccaccttgcctggccagaaaatcttttccttctaaagccctccagtggctactgcggcacttagaatcaagttcaaattctttgccatggtttataagacttcccccagccctgacctgatataccctgtagcctctcaactgttgagaggaacctcttctactgttcctccgtaacagtgctctaactgcacttaactttaaaacaatttttttttttgagacggagtctcactctgtcaccaggctggagtgcagtggcgcgatctcggctaactgccacctctgcctcctgggttcaagtgtgcctcccaggttcattcaattctcctgcctcagcctcctgagtaactgggactacaggcgtgtgctaccacgcccagctaatttttgtatttttagtagagacggggtttcaccctgttggccaggatggtctcgatctcttgacctcgtgatccgcctgcctcggcctcccaaagtgctgggattataggcgtgagccaccgcgcctggcctaaaacaatttttaaaactcaccaagtttttttgccccaggacctttgcactggctgttctgtctgtttgatatgcgtctctcttaggtgatcacaaggctggcatctcctcattcagagttcaggtccaatgttatctccttggggaggctgtgtcaaggatcaccaagtcactctcagacttgaggacttgccaggagaactcacaggactgagcatctagtagtgcgcatgactcacgtgtattgcaataaaaggacgccaagccaaatcagcgaagggaaaaggcactcggggtgatgtctaggggagaccgggtgcaagcttccaagaaccctcttgcagaggagtcacacaggacgtgcgtacttccccagcgacagtggtggcaacaggtgtcacatgttatctaccaaggaagcttattagagacccagtgcccagggttttactgggggctggtgaaatgcatacccaaatccagattcccagaaggaaagcagatattctgcatagactgtgtcgtctgtacaaacagtttaggcacagtgagccattctttctttttctgttggtttgtatctttttatttcataaattgtttttacaactccctatggttatgaccacctaatgccaaagtaaaaattttgaattgccagatttttatgaactgtcagaacagtatgtaaaactatactttaaaataaaactataaaataaaaaaattaaaaatattaaaaaaattaaaaataactataaaaggttgagggtcaccaatcattctaaagaatagagacaaaaggagaagcatattgttgtttatttaatataatcataaaagttctgtaacactgtcattcaggtagaatttgtgtcattaggccaggcgcggtggcttacacctgtaatcccagcactttgggaggccgaggagggcggattacaaggtcaggagatcgagaccatcctggctaacacagtgaaaccctgtctgtactaaaaatacaaaagaaattaggcgggcactgtggctggtgcctgtagtcccagctactcaggaggctgaggcaggggaatggcgtgttcccggaaggtggagcttgcagtgagccgagatcatgccactgcactccaacctgggcaacagagcaagactctgtctcaaaaaaaaaaaaaaaaaaaagaaattgtgtcattaattattaatgtccctatctattatctaggattgacactttgaggaaattgactgtttttgtagatccacttcagataagagctcatagcgatagatctagtggcttagctgctttaagattatctcatgaaatgttgcaataaaaaattatttttcggcctgtcgtggtgcctgtaatcctaacattttgggaggccgaggtgggaggatcacttggggtcgggagtttgagaccatcctggccaacatggtaagaccccgtctctactaaaaatacaaaaatcagctgggcatggtggcgggcgcctgtagtcccagctgtgcaacgcgggaggctgagacaggagaatagtttgaacccgggaggttgcggtgagccgagataacgccattgcactccaacctgggcgacagagcaaaactctgcctcaaaaagaaaaaaaaattactatatattttgtcaagtcactcttaatagttaatggtgggaatcctcctgagatccaagctttcagacagtggtcaagggcccatagcaagtagacgtttctgaggagggcagtctcacactgctatttaaactctttcctgcgcagagggcttccctgagcacacccccaaagttactctcccctcagtcagtttctgatctataattcggttttcttttcttcttggtccttactacagtctaacataatcccatttatttctttgcttactggtgggctgcctgtcaggtaaagatgtggacttcttgtgagaggaaaccacacctgacgatttgctgtttgaaccctagtgtctataacattgcctggctcaggtaatcagcgaccatttattaaatgaattaacaaatgattcacctgtccattgctcaaggataatgcttgctccctgatgggacaagaatgacttccttttacttgtcctaagtgctcctctttcaggctttgcactttggcctgtgggtgccctgctcaaggtgttggctgacttgctcagctgagaggcagctctcctgggtgggaacagtctagtttatcctctccctggccaggcggactgactcttcttttcttttctcttttcttttttcttttcttttcttttcttttctcttttctcttctctttccttttcttctccctccctccctccctgcttgcttgctttcccttccttccctccctccctccttccttccttccctccctccttccttccttccctccctccctccttccttccttccctccctccttccttccttccctccctccctccttcctttctttttcctttctttcttctttcttggttttccttctttctccgtcttttttggttttctttctcttctttaatttttaatttttatacatttaggcagtccaagtgcagtacttgattatatagtgttatggttgagtctgggcttttagtacaactatcatgcaaatagtgtgtgttgtacccacagaccgcatctttccggactgaaatgttttgtttgtttctttttttttctttctttctttcttttgagactctgactccctagttcaagcgattcacctgcctcagcctctcgagtagctgggattacaggcgcccaccaccacacccggctaatttttgtatttttagtagagacagggtttcaccatgttggccaggatggtcttgatcttctgacctcgtgatctgcccgcctagacctcccaaagtgctgagattacgggcatgagccaccgtgcccggctcaatttgtttctttttaaatttaattttaaatttaaattttattgatttatttatttgtttttgagacagtctctccgtcacccaggctggagtgcagtggtgcgatctcggctctctgcagcctcctcctcccaggttcaagtaattctcctgttagtcccattttatggatgaggaaacaggtttcctgaaggcatttgctttgggttagaacataaagccagcgagtaggggaactggaattcaaattgaagtccgtttgacttaagaggctccacctttgacaattaacatgctgtctacacaacacacacacacacacacacacacacacacgcgcgcgtacattttataagcgctgaagttgtaaaagggtaacctttgatccttacactaccttatacttcacagcaaacttttccagagagtttcatctcaacttccaaggaacttttcccagcactttgggaggctgaagccggtggatcacctgagatcaggagttcgagaccagcctggctaacatggtgaaactccatctccactaaaaaaaaatacaaaaattagccaggcatggtggtgggcacctgtaatcccagctacttggggggccgaggcaggagaatcacttgaacccgggaggcaaaagttgcagtgagctgagatcatgtcactgcactccagcctgggcaacagatggagactgcgccttaaaaaaaaaaggggggggccgggcgcggtggctcatgcctgtaatatcagcactttgggaggctgaggtgggcagatcacctgagattgggagttcgagaccagcctgaccaaaatgaagaaaccccgtctctactaaaaatacaaaaattagccaggcgtggtggcgcatgcctgtaatcccagctactcgggaggctgaggcaggagaatcacttgaacccgggaggctgaggcaggagaatcacttgaacccaggaggcagaagttgcagtgagccgagattgcgccattgcactccagcctgggcaacaagagcaaaaccccatctcaaaaataaataaataaaaacaaaacttccttttttttcttttttccctttttctttccttcctgctttcctcctctttcatccttcattcactttttcttcagaaacgcagccaggcactgtgctagtcactggggagacaggtgcgaacaagacacacacctgtagtttgcctctttgcaatctggctttaaggtgctgcaggcattgaagccaccaggttcgtaaatggcaagccacaagaattttgcaaaaggtcccagaaagtgaggaagccactgaggtcatgactgcagggcactcccactgtgcgaacaaaaagtgaggccacagctgctaggtgccaccacaggaggaagcaaaaatatcatctccttcctgccaagaggcctgagaggacgcagctgcctgcacctcggcatgtccagcctgcatcctgctcctcaccctggctaggatggtgcctccccagctatgcagtcagtgggctgtgtgggagccattgtccccacgtccacctcccagaaacctcactgctaggattggccctgcctttcacccaggtgtggccaccaactacttgacctttagacataaagttttttcttttaacttttggtggctgcttcacaaacattttctttttatctccctcttcttcttcttttctccctcttctcaaaagaggcagcctctggaaaacaaaagaaaaagacagaaagagggggatttaaggactatcgaaccctcccctcctgctaaatgtttaggttttcatagtccttattaaccctatccatggttccattaatgaaacatccctcaattcccaataataacagctaactttaggccaggcgctgtggctcacgcctgtaatcccagaactttgggaggccaaagtgggtggatcacctaaagtcaggagttcgagaccagcctggccaacatagtgaaaccctgtctctattgaaaatacaaaaaaatgagctgggcatggtggtgcatgcctgtatttccagctacttgagaggctgaggtgggagaatcacttgaacccaggaggtggaggttgcagtgagccaagatggtgccattgcattccagcctaggtgacacagtgagacttcacctaaaaaaatactactactacaatgactactactagtactactacttgtaatagctaactttaaccaaagaccttatgtgagcctgcactagctcacagaatccttccaatactatgcaatgtagggactgtgattatctccaattatagatgagaagctgagccttggagggaggactgccatctgtctagcattaatggttaaatagctggaaaatggtgaagccaggcaggtcagactccagatatatatgtgcatttattgcaaactcaactttcattttcctttacccatgtatagaacccatcacagaggaaatggatttcatgtgagtcacatgcatattttttctataacattttggaatacttaagcaccatcaattaaaaagtcacatatctctctgggttctttggtgatacttactgagtggaagtagacattatgttctctgtccataactgatcagctcaaaatctttgttaattattgtgccctgagttaacttactcattatttctttttgaaagatggtaggcttgaaaatatgtctaaggaaaaatcatatttgtgtggatatatttttttagccctctatgtagattcttactgcactggggcatagtctcacagggttaaattattcaagccacagacaaaaacttgtacccaaatgtttagagcaacattgttcataatagttaaaaggtagaaacaataaaaatgtccattagctgattaatggagaaacaaaatgtgatctattcacacaatgaaatattattgtcataaaaagaaatgtattaatacatgctacaacatgaatgaaccttgaaaaaatgttaagtgaaagaaaccaatcacaaaacaccaaacactatatgattccattcatatgaaagtccggaatagcctgcaggctgaggtggctcatgcctgtaatcccagcactttgggaggccaaggtaggaggattgcttgaggccaggagtttgagaccagcctgggcaacatagcaagactctgtgtctctaccaaaaaattaaaaaaatttaaaacataataaagataaataaaattttttaaaagctgggtgaggtggctcatgcctgtaatcccagcactttgggaggccaaggtaggaggattgcttgaggccaggagtttgagaccagcctgggcaacatagcaagactctgtgtctctgccaaaaaattaaaaaaatttaaaacataataaagataaataaaattttttaaaagctgggtgtggtggcttatgcctgtaatcccagcactttgggaggccaaggagttgaggcaaggaattcgagaccagcctgggcaacatagtaagaccctgcctctactaaaaataaaaataaaattacctgggcatcggggtgcacacctatagtcccaactacttggaaggctgaggtaggaggattgcttgagcccaggaattcaaggctgcagtaagttatgatcatgctactgcaccccaggctgggtgacagagagagaccctatctcaaaaataaataaaataataaaataaaacgagtccagaattgggcaatctatagaacagaaagtaggttgcttagggctggcagggcaggaggagtgggtaccgggggattaggggatagtaggtaaagtttatagggttttttgtgaggtgataacaatgttctaaaagtgattgtgttcgtggttgcccatatctatgaatacaccaaacacaattgaattatgcactttaaaagggtgactttcataatatgtgaatatattccaatgaaactgtttaaaatatcattaatctggccacataaagcttataattcaagctttatgtacaggcatcccttgttttcactatgcttcactatattgcccttctcaggtactatgtttgttacaaattgaaggtttgtggcaaccctgtgaccagcaagtctatcagcaccattttcccaaccacaaagtgagtatgacgtgctcactttgtgtctctgtgtcacattttggtaatgctcacaatactcacactttgccattgttattatatctactatggtgatctctgatcagtgatctttcagttactattgtacttattttgaggtaccatgaaccatacccatataagatggcaaacttaattgataaatattgtgagtgttctgactgctccactgactggctcatctctctctctctctctttctttctttctttccttcatctctcactttctttctaggcttccctagaccctaagacacaacaatactgaaattaggccagttactaaccctgtgatggcctctaagtgttgaaatgaaaggaagagttgcatgtctctcactctaaatcaaaagttagaaatgattagggcatgtcaaaagccaagaaaagccaaaagctaggcctcttgtgccaactaaccagcctgtgcatgcacaggaaaagttcttgaaggaaattgaaagtaccacccctgtgaacacataagtgataagaaagtgaaacaactttattgctgagatggagaaaattttagtggtctggatagaaaattaaatcagctataatatttccttaagctaaaacctaatccaaagcaaggctctaactctcttcaattctgtggaaggtagagaggtgaagaagttgcagaagaaacgttggaagctagcagaggttggctcatgaagtttaaggaaagaagccatctccataagatagaagtgcaaggctgggcgcagtggctcatgcttgtaatcccagcactttgggaggctgaggcaggtggatcacgaggtcaggagttcgagaccagccttgccaaaatagtgaaaccctgtctctactaaaaatacaaaaattagctaggcatggtggcgagcacctgtaatcccagctactcaggaggctggggcaggagaatcacttgaacctgggaggcgaaggttgcaatgagccaaaatcacaccactgcactccagcctgggtaacagagctagattccatctcaaaaaaaaaaaaaaaaaagataaaagtgcaggtgaagcagcaggtgctgatgaagaatctgcagcaagttctccagaagctctagctaagatcactgatggaggtggccacactaagcaatagattttcagtgtagacgaaacaaacttcaattggaagaggatagcatctaggactttcacagctagagagaagtcaatgcctggcttcaaagcttcaaagactgattcttttgttaggggctaatgtagctggtaactataagttgaagccagtgctcatttgtcattctgaaaatcctatggcccctaaaaagatgatgctaaatctactctgcccatgctctataggtggaacgacaaagcctggttgacagcacatctgtttacagcttggtttactgaaaattttaagcccactgttgaaacctactcctcaggggaaaaaaattcaaaatattacttcccattgacaatgtacctggtcactccagagctctgatggagatgttcaaggaggtgaatgttgctttcatgcctgttgacacaacgtccattctgcagctcttggatcaaggaggaattttgactttcaagtgttattatttaagaaatacatttctaagtctatagctgctatagatagtgattcctctgatagatctgggcaaagtaaattgaaaaccttctggaaagaattcatgattttagatgccattacaaacattcttgcttcatgggaggaggtcaaaatatcaacattaacgggtttggaagaagttgatttcagcctttataggtgactttgaggggtttaaagacttcagtgaaggaagtaactgctgacgtgatggaaacggcaagagaactgtaatgattaatggaagtggagcctgcacatctgactgaattttcgcaatctcatgataaaacttgaacacataaggactcgttccttatggatgagcaaagaaagtggtttcttaaggccagatgtggtggctaacacctgtaatcccagcactttgagacgctgaggtggttggatcactggaggccaggagttcgagaccagcctggccaacatggcgaaaccccatctctactaaaaatacaaaaattgtcgggtatagtggtgcacaactgtaatcccagctactcaggaggctgaggcaggagagtggcttgaacccagggtcagaggtagcagtgagctggggtggcaccattgcactccagcctgggcgacagagcaagactctgccacaaaaaaaaaaaaaaaaaaaagaaagtattttattgagatggaatctactcctggtgaagatgtgaacattgttgaaatgacaacaaaggattcagagtatgacataaacttcgttgataaagcagtggcagggtttgagaggactgactctaatttttaaaaaagttcaactgtgggtaaaatgctatcaaacagcatctcatgctacagagaaatcttttgtgaaaggaggagtcagttgaagcagcaaacttcgtagccttattttaagaaattggcacagccacctcaaccttcagcgaccaccaccctgatcagtcagcagccactgaggcaagatcctctgtcagcaagaagattacaactgtctgaagtctcagatgatcattagcttttttgccagtaaaatatttttacattaaggtctataaatatttttagacataatgctattgcacattcaatagactacagaatagtgcaaacataaattttatatgcactgggaaaaaaatgtgtgactcactttattgtcatatttgctttattgtgggggcctggaacagaatctgcaatatctctgagatatgtctgtggttttttttttttttttttttgagaaggagtttcgctctgttgctgaggctggagtgcagtggcatgatcttggctcactgcaacttctgcctcccaggttcaagtgattcttccgcttcagcctcctgagtaactgggaatacaggtgagtgccatcccacccagctaatttttatatttttagtagaggtggggttttgtcatgttggccaggctggtctcaaactcctggccttaagtgatcttcccgcctccggcctcccaaagtgctggggatacgggcagtatggagtcttttcagattggctactttcactcagtgatgtgcacttatctttcctccatgtcgtttcatggcttgatagcaattttttttttaagtgctgaataatattctattgtctggatgtattacatttgtttatccattcatctaccaaaggacatcttggtagcttccatgttttggcaattataaataaagctgctataaacattcatgtgcagatttttgtatagacataaattttcaactctttgggtaaataccaaggagtacaattgctggatcatatggtaagattatgtttagctttgtaagaagctgccaaactgtcttccaaagtgcctggaccattttgcatttccaccaacaatgaatgacagttcttattgctgtacatcctcactggcatttggtagtgttgttgttctgagtcttggccgttctaataagtgtgtcatggtatttcattgtcatggtatttcatggtatttcatgtgtatacttggcattgcccagatgacataagatgtgcagcatcttttcatggtttatctatgatctgtgtgtcttctttggtgaaatgtctgttaaggtctttggcccattttaaaatttcattgtttgtcttcttattgagttttaggagttctttgtatattttagataatagttctttatcagttgtgtcttttgcaaatattttctctcagtctgtggcttatcttctcattctcttgttgtctttcatgcagcctctggagtttttaactttctgacttgtccacacatgagcttccagtcatgaatcaattacacttcaggtgtaaaaaaataatcttttttttttttttttgacatggagttttgctcttattgcccaggctggagtgcaatggcgcgatcttggctccctgcaacctctgcctcccgggttcaagcgattctcctgcctcagcctcctgagtagctgggattacaggcatgcgccacgacgcctggctaattttgtatttttagtagagacgggatttctccatgttggtcaggctggtggcgaactcccaggtgtgcctaccctggcaccggttcccacggagctttctgccctggtaaattgtgattccggatattcgtctgctggtctctccaggttggggagtaatggtttgccccatgacctctcttgccataagaatctaaaagaactgtttggtttttagtttggttagccttctccttgttgttaggatgaagtgctgactcccaagcttcgtgcttgctggactggaaattggaagtctgcctgccagttttaagaacctaaaaagtgatgaactgaaaatgtcaggtaaagggatttcttttcttttcttttcttttttgtcatttggttggattctaaatataaaatttaggcttctggtagaagttctaaagatgcctgaaagaggatagttttgactgatatgtttgttggccacgcgtgggaaaatggtgttagtgaaaagcacatgaatcctggtgccagcagaaagtgggcatgaattcttcttccgtcaatacccagctttgtgcccccaggcaagtcacttcacttctctgagcttcctttttttaatcttggaactaggtattgagccagtaaccggaagttgtggtgagggttagaggaaatttgtatatagagcattacagaaggcatattccccgttagtgcatacatgataaaaaagaaacatcacagaacattatagaagtaaaatattttctttccttaagtatggaaagaaactgatggagtgtttacttaattctacaaggataaaagaaactattcaaggttaacacaatgcagactgaactgaagagcgttatgtggaaagcaaatttgaataacggagaaaacacaactcattctcacagctgttgaaagtctctgggcacattgggtaaaggctaagaggttaagctttcccccttggagccttgtggtcattgggaagattctcctttgagggaatcattctgtaacatagtaattgggtagtaagagagaattgtcttgctaagagcagtaaagtaagtggccgagtagcaaatcttcatcagttatcaggtgcatctcttaaaaaggcctatgtaatactcagcaacaggatcacgctattgtgtttgggagaataaacttatttcaagcacaaagattcctccttcctcttttaaaatctctactttctgtgctcctccccactttgagggaagtgatacactaaaattaagtgatggcttattatcatggttaaccagtctgtcttgaatttgcagcctgagctgaccagcgcttatcctcatgtgaccttgggtgaattaatggacatctctgaacctccattttctcctgtgtaaaatagcagctgcagcaaaaatgaaatatcaataatctctgaaaagaatttagctcagtgtttggtgaagattgcctctcctgaagtctagaaaagggctggtttggtatgtattcaaaatctaaatgttcttttgaaacagcaactgagaaacactgtattgaaattaaagtggcagtttagaagaagtttaaaaagctgagaaagtatggattttgcgatgatcaggggtaatctcgccacctgcaagagaaaacaaacatcctgctatgttttttgctttgctgtaatcacttcgacatctagcccgtaagtgaacaaagatgggaaaagattggcaaggatcaaaatagaattggagaagagtttcaagaagaggtcaatggagggggacagcttatcagttctggatggaacctggtcatgaacacatatggagaagactgacaggtgaatgcacaagcagctcttgcagttgttcaggctcacatgaagccctggacaatgctgtgctgctgtggctgcacctgctaccagccttgacactgcatgttctctatagaaatgctactgctcttgaaggggtaaaactggttcttgggaagacatgagaaaatctcactttagaaaatattaatataggccgggcacggtggctcatgcctgtaatcccagcactttgggaggccgaggcgggcagatcacttgaggtcaggagttctagaccagcctggccaacatggtgaaaccccatctctaccaaaaatacatgtataaaaaattagccgggtatggtggtgcatgcctataatcccagctactcgggaggctgaggcaggagaatcacttgaacccaggaagcgaaagttgcagtgagctgagatcacgccactgcactccagcctgggtgacaagactccatctcaaaaaaaaaaaaaaaaatctatctatctatctatctatctatctatctatctatctatctatctgccaggtacagtggctcacgcctgtaatcccagcactttgggaggccgaggcaggtggatcacctgaggtcagcagttcaagaccagcctggccaacatggtgaaaccccgactctactaaaaatacaaaaaaattagccaggcgtggtggtgggcacctgtaatcccagctactcgggaggctgaggcaggagaattgcttgaacccaggaggcggaggttgcagtgagccgagatcgcaccattgcacttgagtctgggtgacaagagcaaaactccgtctcaaaaaaaaaaaaataatatacgtaatacacaatatatgtaccatacaaaaacagataacagtatacatgtggtattgaagtatcatgggggacaattgaaaaaaaaagtctaaaaggctctccggaggattacaggtgaaaacagctctgagaagcactaactcacaccactagaacggggcagacggaacatggcagaagggcaggggcccgatacaggacctcaaggaagaaaggaacttgggaggacagggaggtggcggtgggccttgggaatagggattttgtgagtttggcaagtgggagattccccttgaggtagcaacgcaaccctcttgcttcttcctcctctcagtttggaaggctgtgccacgtggcaagaagagaataaacatcttgggaattctggctgtgctgtacatttgctgtgtggccttcggcaagctactgacttctctgaactcaggatctacaaactgaggataagcaacaggagaatctctgtgaagtactttaaaaacaggagatgtttggtaaatgtgcagtcacgttcatgactcttcaaatttcttttgaaatttctgaaaatgcctggtgcggtggctcatgcctgtaaccccagcactttgggaggctgaggcgggtagatcatgaggtcaggagttcaagaccagcacggccaagatggtgaaaccccgtctctactaaaaatacaaaaaaattagctgggcgtggtggtgcgtgcctgtaatcccagctactcaggaggctgaggcagagaattgcttgaacctgggaggcagaggttgctgtgagcccagatcgcaccactgcactccagcctgggcgacagagtgaaatccgtctcaaaaaataaaaaaaattaaaaaaaagaaatttctgaaaatacgtatatgggggattaattgcacatgtggtgttgtacatccattattctatttaatccttacaccagccctatgaagtgtctatgattagtgttattgcccttttactaataataaactcaagctctggagggttaagtgtaagtggttcaagctcatatagtgccagagagtaaagatgtaaattcccccaccccatcagcagagagccccgtgctcgttaccaccatattattcgtgaacatttcacatcagctgggactttttgcccaggaaattacacatctgtgcacaattttgcataccattgcagaagactgagtctatcccaaactccttgttctaaagtagaagtttcaacaagggactgtaacttcctcctgaaacacagtttgggaattggtagaggtgctttggatgaacacatcagtgtagtactaacatgtgctggcatacacagcagggatgatgggttggatgtattttttgaaatgtatttttaaatttacatacagtaaaattcactctttttggcgtacagcacaataagttttgacacagtatagtaatttgtttgttttttgagagacggagtcttgctctgttgcccagactggagtgcagtggcacgattgcagtttactccaacctctgcctcccaggttcaagcaattctcgcgtctcagcctcccgagtagctgggactataggtgcgtgccaccacgtctggctaatttttgtatttttagtagagacaaggtttcaccttgttggccaggctggtctcgaactcctgacctcaagttatcctcttgccttggcctcccaaagtgctgggattacagatgtgagccatagcacccggcctaaatcttttccccgttaaaaaaatgggtaatttctttttcttttctttttcttttttttgaaacggagttttgctcttgttgcccaggctggagtgcaatggcacaatctcggctcactgcaacctccgtctcctggattcaagcgattctcctgcctcagcctcccaagtacctgggattacaggcatgcgccaccacacctggctaattttgtatttttagcagagatgggatttcaccatgttgaccaggctggtcttgaacacctgacctcaggtgatgcgcccgtcttggcctcccaaagtggtgggattacaggtgtgtgccaccgtgcctggccggtttattttcttatttttgaattttgagagtttaaaaaccatattatcaaaaacctttgtcgaatatatgatttgcaaattttttttctagtctgtagcttgtcttttcattctcttaacagtgttttttcagagtgaattttgataaagtctattttatcaaaactttcctctatgtattgtggttttgctgttgtagctaatgttttcaaacaccataagccaaccaaaatacaactaggggtcatatttgccctgtgggtaatccatatttaggtaggatttttaggctagaaggaactttaggagacatggaagacagaaacatgtgcctcttgtatttcctgcagcagggactgtaattgaccgagggccctgcgatgctgtgatctgaaagctattatcatatttgtgccaaggttacatttcccgtgggctgctccttgcccacgactgcatgcgacagggatactaaggcaggcttgttcctgggggacatgagactcctctgatacataactttggctttttcaaaactttctcagaactgcaccaccctctcagactttccctaccaacccgtcctttttccccttcttcctctgcgggggttagggcagcattgtgggaaatctccttccccttctccctccagctgtttcttccaggaaatgtgaggcatgctttttccactttgcagtctgatagtctgcacctcaaaggaaccaaacgaatgcagaggatcccctgccacaggaatcactgtctccaatgccatgcctggcaggtaatgtacatgagtaaacagggtcaggtgaggactgaggtgaactgaaaattccatgccctattttatgaggacagcttctacctagttctaacaggctgttatcaagatgaaatgtgagcccacagttgaatgccactagatatttaaagagaaaagctacaaaatttttacaatttcttttttttttttgagatggaatctcgctctgtcgccaggctggagtgccgtggtgcaatctcggctcactgcaatctctgcctcctgggttcaagcgattctcctgcctcagcctcccgagtagctgggactacaggcgcacaccaccacacccagctaattttttgtatttttagtagagatgaggtttcgccatgttggccaggctggtctcgaactcctggccgcaagtgatccgtccacctcggcctcccaaagtactgggattacagatgtaagccaccacgcccggcaatttttacaatttctaattcaaccctgtcatttgtcagaaggagacagcaagacagagaaaggaagtgcttttcctaagatcatctgaatagaaggtgcaaagtgtggctggaatccagagatgccacctcctgatccagctctttcctttcttcctctctattcattattgattgactatctgggtttgtatttgctgtgtcacaagttatctaaacatttagcatcttataataagacatatttattgtctcatagtttctgtttgtcagaatcagcccttgcttcagggtctcagacaaatcggcattcaagatgtcagcctatgctgggatttcatgtaaagactctacatgggaagaagctgtgtccaggctcaggcggttattgggaggattcagttccctgagggctgttagattgaggacctgagatcttttctcactattggtcagaggccaccctccattccttgccacctggggcattccagatggcaacttacttcatcgaagtgtgcaagctgagaaggccacagagagagtctgctagcaagacgaaagtcacaatcttttgcaacccaatcgtggaaatgacatcccatcccctttgctctattctatttgttaggaagtcactaggtccagcccacactcaagggcctacactacagggacatggggatagggtggggaccatggggctgggctagaattctgcctaccacaaggccttttttttgaaaatggaaaattctcagttgtgcttgatctttctcttctaaaccaggaaaccacttttcatgggagaggtcagggatctattaagacagaaacaagaggggaggggaggggaggggaggggaagggaggagggagggaggggaagggaggagggagggagggagggaggaaggaaggaaggaaggaaggaaggaaggaaggaaggaaggaaggaaggaaggaaggaaggaaagaaagaaagaaaattggaaaggctcctcctctccctctccctctccccacggtctccctctccccacggtctccctctccctctctttccacggtctccccctccctctctttccacggtctccccctgatgccgagccaaagctggactgtactgctgccatctcggctcactgcaacctccctgcctgattctcctgcctcagcctgccgagtgcctgcgattgcaggcgcgcgccgccacgactgcctggttttcgtatttttttggtggagacggggtttcgctgtgttggccgggctggtctccagctcctaaccgcgagtgatccgccagcctcggcctcccgaggtgccgggatggcagacggagtcgcgttcactcagtgctcaatggtgcccaggctggagtgcagtggcgtgatctcggctacaacctccacctcccagccgcctgccttggccccgcaaagtgcggagattgcagcctctgcccggcggccaccccgtctgggaagtgaggagcgtctctgcctggccgcccatcgtctgggatgtgaggagcctctgcctggctgcccagtctggaaagtgaggagcgtctctgcccggccgccatcccatctaggaagtgaggagtgtctctgccaggccgcccatcgtctgagatgtggggagcgcctctgccctgccgccccgtctgggatgtgaggagcgtctctgcccggccgcctcgtctgagaagtgaggagaccctccgcccggcagccactccgtctgggaagtgaggagcccctccgcccggcagccactccgtctgggaagtgaggagcgtctccacccggcagccaccccgtctgggagggaggtgggggtcagccccccgcccggccagccgccctgtccgggaggtgaggggcgcctctgcccggccgcccctactgggaagtgaggagcccctctgcccggccaccaccccatctgggaggtgtactcaacagctcattgagaacgggccatgatgacaatggtggttttgtggaatagaaaggggggaaaggtggggaaaagattgagaaatcggatggttgccatgtctgtgtagaaagaggtagacatgggagacttttcattttgttctgtactaagaaaaattcttctgccttgggattctgttgatctgtgaccttacccccaaccctgtgctctctgaaacatgtgctgtgtccactcagggttgaatggattaagggtggtgcaagatgtgctttgttaaacagatgcttgaaggcagcatgctcgttaagagtcatcaccactccctaatctcaagtacccagggacacaaacactgcggaaggccgcagggtcctctgcctaggaaaaccagagacctttggtcacttaactgctgaccttccctccactattgtcctgtgaccctgccaaatccccctctgcgagaaacacccaagaatgatcaataaaaaaaaaaaagagaaagaaaaaaaaaaagacagaaacaagtgctggtataactgcagaaagagatagagaagagagatcagtgagagcaagaaggaaaaaaaattgcagcggatagtgtgaggggagcaaaaggaagctccaagccaggacagcaaaaccctctgttctccttttcagatgatttcactgtgctctcttttctttctttttttctttctttttttttagatggagtctcactctgtcacccaggctggagtgcagtggcatgatctcagctcactgcaacctctgtctcccaggttcaagcgattcttctgcctcagccttccgagtacctgggattacaggcgtgagccaccatgcctggctaatttttgtattttttagtagagacagggttttgccatgttggccatgctggtttcgaactcccgatctcaggtgatctgcccgccttgcccttccaaagtgctgggattacaggcgtgagccactgcgcccggcctgttctcttttcattttgtacttgccacaggtgtgaaaaactgacagattgttcttagcaaagttcagacatggcttttgcagagattatttgctcttttgatgattacgtatttcttcttccactactgatagtgtatgtagttgtcaagggagaatacccagatcaaaacaaaggaaactgattcctttgcacatagggaggaagttgtaactgcccaatgggttctccttcctcattgcctagacagacctgatttatcaaaacgggaatttcaatacagaaagagtttaattcatgcagagctggctgtacaggaggccagagttttgttgttactcaaatcagtctccccgaaaactcagggatcggggtttttacggataatttggtgggtaggaggttgaaagacggggagtgctgattggtcaggccggagatgaaatcctagggagtcgagggggtcctcttgtactgagtcagtttctaggtaggagccataggaccaaatgagccagtctatccagggctgtgctagcggattcactgagtacagggtctgaaaatatctcaagcactgatcttcgcttttacaatagcagtgttatccccagaagcaatttggggaggttcagaacctcgcagcctccagctgcacagcttctaaaccataatttttaattttgtagctaatttgttagtcctgcaaaggcagtgtagtcccagtcaggaagagggtttttgttacagtctttctttcaaagtgaaactatcaactaagttcctcccaaagttagtttggtatccacccaggaatgaacaaggacagcttggaggttaaaagcaagatggagtcagttagatcagatcttgttcactgatacagttttctccattgtaatttttgcaaaggtggtttcaaagtgtggaaaaatattaaatgaataactgttaatatttttaaagggctggacagccttgtcccattgaatgctcagaacaaccctgtgagattgatattagtattgcccccattttacagaggaagaaattgaggctcagggcgattatgaaacttgcctaactgaggtcacagccagatggtgctggagcaggaattgcttcatatttgttttactccaataaccatcaccagagcattacccaaacttcattcactcatgtataaactgtcatagttgttgtcatatctaatatcgcttatcctactgtcacatatttgtatcatatatgggaacattttaccactctctccctataacatgcagtggtccaggctctgaactgctgaactgaactgagttcaattctgattctaccacaagctggaccatctgggcaagctacttaacctctctgtgagctgcagttttcccatctctaaaatggagcacatggctcagtttgccggctagtagagagactaagtaatatgatagaaataaattaccaggtacattgtaggtgctccataaatactttgttggaaggaccctcaaaaagtagaatttctatttaattagctcttctaaatgacatatccatagttaacatatttccaacaccatcatcaatattaatgaatttcttagcttcccaggacttcccagaaatgtccaattaagtacttgttaaaaatggaatgaaaatttaatatcccatagtttgaggcaatatcaaaaagccttgttagtctatttggatcatatcaaggaaactagataaatatatttgcttatatttgctatagttttgtgtgtgtgtgtttgcttacttgtggaaaccataatgaccaatattataccatggctgagagtgtagatttggaggttttaatttctgatccctcagttcattgactttgtgacactgattatctaatagttctctgtctcaatttcattagataagttgggaaggctttcagctgtaagtagtaaccaccataacaaaaagccaacagaggctgaaacaaagaggttacaatttttcctcactttaaaggatgcagaggtagcaatgtgcttctgtagctcaagaatgtcagtgctttgtggttcacctagtctttccttatggtcacaggatgcctaacccagttcacttttatggcagggaaaagagaaacaagtagaaccactgacatctaatcatttgcaagacaacaaacccctgcccagaaactttccagccgtctcttctgttcgggcttcactggcctgaattgtgccataaggccaagttgcaagggagcctgggaggggctccagagtggaagtggccgaggaacagggagctgtcgtgaggatgaactgagataatgcttataaagggcttggcactgtgccggactgtaacaagcacttcatacttacaatgattggcattttcataatcgggctgtttgaactggaacagggaaactcagccctgattccagtgttctgcagggagtgagtgttagacgcagggcaaaaacctgattttctgccatactggatgacaatattataacatgactgagagcatagatttgggggttttaatttctgatcacttaattcactgactttgtgacattgattatctaatagttctctaatagctcccctccatgaggggcgggtttatgtctttcttgtcaattagcccagctcagtgcctaaaagtagataaacatatggtgctgctgaataaatatttgataaatgaatacatacgtaaagataatttgatacatttattttttttaatttttttatttccataggttttttttgggtaacaggtggtgtttggttacatgagtaagttctcgagtggtgatttgtgagattttggtgcacccatcaccagagcagtatacacagaacccagtttgtattcttttatccctcacccgcttcccaccctcgctccctgagtctccaaagtccattgtgtcattcttatgcctttgcatcctcatagcttagctcccacttatgagtgagaacatacaatgtttggttttccattcctgacttacttcacttagaataatagtctccaatctcatccaggttgctgcaaatgccattaattcatttctttttatggctgagtagtattctatcatatatatgagatatatattgatatacatgatatatagatatatatgatacatatgatatatattgatatatgatatatagatatatatgatacatggatatatgatatatattgatatgtataccacgtatatatgtgtgtgtatatatgtatacatgccacagtttctttatccactcattaattaatgggcatttgggttggttccacagttttgcagttgcgaattgagctgctataaacgtgtgtgcatgtatcttttttgtataatgacttcttttccttttttttctttgagacagagtcttgctctgttgcccaggctggagtgcagtggctcaatctcagctcactgcaacctccgccccaggttcaagcgattctcctgtctcagcctcccaagtagctgggattacaggtgtcctatcaccatgcccggctaattttggtatcatgacttcttttcctctgggtagatacccagtagtgggattgctgggtcaagtggtaggataatttggtgcatttcttaaagtttttactgttcaccattctcaaaagccatttattcgttgtctatttaataaacttcagaatataagaatcataaaactggaacttttgtaagtatattaattatctcttgctgtgtaacaaattttccctaaacgtactcgcttaaaatatggacatttaaaaactttttttttctatttattaaaataaaatattgtctcaagggccagctagaaaaataatggacatttcttagctcacggtttctgaggtcagcaatcctacagcagtttggatggatggttctggctcagggcctcttgtgaatagtcaagatgcagtcaagatgttgttctgggctgtaggcacctaaaagcttgactggagttggataacatgcttctgagcaggctcacgcacgtggctgttggctggaggcctctgttcctcactatgcagaccttcccatagggaagcttgagttctcatgtcgcagcagctgggttcctaagaggaacagcaaggaggaaactccagtgccttttatgattagtcttggatgtcacccagtgtcgcccccacaaccttctgttccttagaaacaagtctctggactccgcctacactcaaggggaagggaaataacctctgccttttggagacaggagtgccagagaatttgtggacctattttaaaaccacctccaactgtttcgttcaatgatttctagcatctaaatatgcttggctcatatagtcagtgctttaatggaagtggttcctgtttataggtcttcaaccttatacaattgggggcttcccaaaagaaaaagaacacaaaattagttaggaaagttaacgtttatttagaataaaagaagaaagtacaacaaattgtaaaaattttaaagctgaaaaaaattactaatatcataaaatcctcccaaaatagcatcttttaaaaattaaccaactgcttgacttttttttgaaacacagtcttgctctgtagcccaggctggagtgcagtgtctcgatctcggctcagtgtaaactccgcctcccgggttcaagtgattctcctgcctcagcctcccgagtagctgggattacaggcacctgctatgatacttttgtcctgtatgttttagctacaaactctttaattatcttttaacaatactgggttattattttatagagagtgactatgagaaggaggatttagtctttcctccatcatgactgatcagaatttttaatataatttaatttaattttagagacagggtctcactctgtcgcccaggctggaatgccatggagtgatcatatgctaactgcattgtcaaactcctgggctcgggtgatcctcctgcctcagcctctagagtagctgggaccacaagtattagccaccacacttgactaattcaattttttttttttggtagagacgagatcttgttatattgcgcgtgctggtcctgaactcctggcctcaagtgatcctcccaaagtgttgggattgcaggtgtgagccactgtgcctgacacgattgatcaacaaaaattttttttaattactattgtcagttttgaaaagtttcttttggcttcaccacttattactggtcaggtattgtaaaattttaggattattgtgttaaatttgagaaaacatatatcacatttctttcttacatgacctccaagatttcagggcaattcgagttttcttgcgcagcaattaatcttaatgctctttgaaggatgacactcattaaccagtcttgttgtccccatcctctgtgtaaagatggagcatgtgctttatgttatctttgtcgatgccaatacatcatgtcaagtcaacaagaactttacttcatttttctgggtgattctatcatttactcctctttaataataggatgattggataacccaatcgcttattcattacttttactcaaaattccgtcttgttcttaatggtgtgacctgtgttctgtttcaacagagaactcactgagagttaaaggtcaaggtgcatcaaacattatgagaggcggctgggcacaggggctcacacctataatcccagcactttgggaagctgaggcagagagatcagctgaggccagaagttggagaccagcctggccaacatggtgaaaccccatctctactaaaaatacaaaaagtagctggatgtggtggcacacacttataaccccagctatttgagaggccgaggctgagagttgctcaaacccggcagaaggaggttgcagtgagctgagatcatgccactgcactccagcatgggggacaaagtgagactttgtctcaaaaaaaaaaaaaaattcatgaaaggccaccggatttgttggaaatgcactaaccgtgaccatcctgtgtgttctcacacacatgcttgctgtttgtggaactgcaacactgaaaggtacatttcagtgtctgcatatactgttttactggaacacagctatgcttattctacatggatgcttttgtgtcacgctgtctgagttcagtaattgcattagaggctacgtggcctacaaaacctaaaggatttgctatttggctctttacaaaaaatttgctgaccagctaccctcctatggcaataagtaaaagatatactcaccccttcggcctcactgaagcaatgaccatttttcagtcctgagtacataccaacctgtagactgcctcaagacttacctccctgctattccttctgcctggaacattcttctctttcctagctagttttccttctgatcccattcattcttcagacaatatcacctaataagaaaagacttctctgaacgcctatctacaacaggtcctccctgttcttctttttttttttttttgagacagaatctgtcacccaggttgtagtgcagtggtgtgatcttggctcactgcaacctcttcctcccaggttccagtgattctcctgcctcagcctcccaagtagctgggattacaggcactcgctgccatgccccggataatttctgtatttttatttttattttttttacttatttatttatttattttttattgatcattcttgggtgtttctcgcagagggggatttggcagggtcataggacaatagtggagggaaggtcagcagataaacaagtgaacaaaggtctctggttttcctaggcagaggaccctgcggccttccgcagtgtttgtgtccctgggtacttgagagatggggtttcaccatgttgaccaggctggtctcaaactcctgacctcaagtgatttgctggacttggcctcccaaagtgctgggattacatgtgtgagccactgcgcctgaaccttcctgttactcttcaccatagtttcctgctcttttccatgatggtcctgcccatggtttctaatgattgattgatcttcttgtttaaagttgttgtcctctttactctgtaaactccctgtcaatagaaactacatgtcttatcacgataggtaaaaaacatgtactccgatgtcagatggcctggatttgaatcccggctctgttacttataagtcatggaagctcgagtaagtcatttcccctctcagcttctcagttttctcatctgagaatgggcgcagtcatagtaacgattgcattaagttctgaaggttaaatgagttgatgcagataaaccactaagaacaatgcctggctcatcataagcgttagagaagagttagttattaatactcaaaactgtatcttcaaggtccagcacaaaagagctgaatgagtatccctttaacaagtgaaactttttttttctgaatgaagcagtagtggaatgaaggttttatctagatgaaaaaataagtatctcatatctctcttgctctttaatcatatgctgctgtactgaaacactatgggcgtctaatttcatttatcacatgaaaggcaatgattcaccttgacttacaaaacaaagtcgaatcagtaatgcaagagtttgaattattttttaaaattaatcccccctccccccaagactcccccaggatctgtattagtatgccatggccagagtaaaacctataaatattatgaggcctacattactcagctgttgccacaataatgcaaaaaatcactccaagactcagtggcttaaaatggtaattatttattctcacataaacatttgcaaattagctggggtttagatgacctggggtggtccgggctgggcttcaagttatgggctgagtccaagtttgctccaggtgtcttccatcttccttggacgcaggcatgtgtatgcatctcaaggcaatgttggaagtgcaggagagccaggcccactgtgcaaatccacagtgaccttgatggcatcatgcttgctaacatcttactggccaatagtcacatggccaagtccaacatccctaagtcagggaagggtattcctccaaagtgtggaggagtaaaaattttctgaacacaaatccgaactatcccaagacctgtacccaaataaaaatgaaaacaaaactcaactaaaacttaaaactgtgtcttccaagggacaaaaaaatctgtatgttgaaacttaaattaactttcctgaattttcttgttgcatcatttggccagtaaggcaggagcacggtgttctctctgcttttctggtccttgaagcatgtgcttcgtctgcataatggaccaatcagagctgtttatgtttctgtcctagcaccgcccccatgcagcagatatttgataaagttggtggaaggcaattgttgaattctataaatatatggcaattgcatcaatgcatgctatatttgttttacagaaatttaaggtcgctgtaggtattgtgcgtttctacatcaaagcttcaaaaatagttccggggtgtggaggtgcacatagcttctactagcaatacacacactctggagcactcccgggaagtcgtggcctctgggttttctgtttgtttttctgtctcctttgcaatgtaaatgaaatcactttctcagcctgatcattgctcgagggaaatgcatgcctggaaaataatcaacagagaggagaatgtagacaagtaagtaaacagtttaatgaatataaaataaaacgtgaattaaagctggctttcagaacctaccattatcctttcatccactgtttattcaataattacacagtcaattacaacttgcataaaggattttatatacctattagtctataaatatctacagtatatgcgtatttatagataaagagggaggagaggatcgtgactgaggaaaagcgttctgacagaaataactgcaaatattgcaaggttgagcttctaccaatgctagtttttcctgacccaggagaactcacatagtgttatgaattttaatatcacagcaattttttatcgagaacctaacaggagccgcacattggattaaccgagaaatctctctgtatctatactcatattatttctaacccatgtgacacagccaccagatatcccattttacagaggagaacactgagactcaggaagcagttcgagcctgtgtttgaactctattatgtttcacgagagaataggcctgtgatgaagtttggctacccacctgtgtacagagagggccgatggaagacaaacaatgcaggcatattgatatccatgtggctgtcgcattttttgtgtgccaggattaatgtaatagaacactcagcatggaaagccaccccggggctgctcctgtatatattttgttacatattcccttctgtttcccttcagtcatttaacatagagcttctttcactggaggacgagaataggcgtggtgagtatgtctcctggattagcaggtgcctctggtttgaaaatgttcattctcagaaccatcggtgaaacccagagatgaaatcttacaagctaatgataaagcttcaagtagccaccaccatgggaaggacttaattatgtgatgtttaaagcagtgtctgtagattacacagatatggtgtctcctttctgtctggcacatgccttacaaggcacctttattgaatcatgactgttagctttccttggctgtgtattagggccctggaagcttctattcaggtttagctattatccacgcaaagatcgttattgctctcttgtttgtattttagcctggagatttgtcaaggaaagaaaaaacaattaggtaactgtgtaatgacaaaagagcaatttggtttgaaaagtctcagaaaacagctattttttttttttaacttctagggcatttctgcttttttgaaaacaaaatatgtttaggagaatctttgtttttacagatacaaaataaagcaagagggtttctgcctttctagttaaagagcaatctttaaaagtcatccaagaaaagttggctctgttttctgaattgctatttgggagaacaaaagaagcaagggaaagtttgacttgacttcctctacaatttgtttatatcatcggagcagaaagaatctcagggctcagctctccacttcctgaatgaggagagagagagagaaaaaaaaatgcccgtgtgtcaaattcattgagatgtgcaaagtgatcagcaaaaatcctgatggactggagcccaaatggcaaaggaaggatattcttcaattcagctgctatctggcaagagagctgcaaagtcctgatggcgagtgtcaccaaatacctcctcctctcctccccagccacagaaaggacaggcaaggagggtgcagcctctcctggcctgttgctatggagtcgggctaatccaagacaatgtttcagtcggtccaatccaaagacagcagtggtagcaatggaatagcattgaaattataaatatttacttgaaaataatgctcaagccagacttaactgaaatgataaggtcctgtttacttctcttggtagtagccagctgaaacaaccaaaccagttaagcaacatttttttttttttttttttggtcaggtatgtactgaatcactggcagcaaacttgtgggattttaggagagagcttttctctctctctctctctctctctcaattctgggcagaatgcttatttttgtttcgttttgtttgttttaaggaaaacaacaacagaacttgaggctggctgagtttattagattactgattatcactgttagtttcccgctgcttgtatttgttgggggtggtaagggagatgaggacaagaattcagatgaaaaacacccaggcttttctcttcatgaaatcccccctgtgaggttttccagcttgccttcccataacttgattctgatgaggtctgccatagctaacctattaaagagaacattgaaattggtgggtgaaaagggttaaaaatacagcttagcagtgaatatattcgggtttagcacccttactggaggctgtgatttcactggccttggaataccagagggaattgcaaaacatgtagatagaatgaagagatagagtgcagatagagtggggacagaacagagtggtaaagagaaccaggctaagggtggctacttccctctgaagggtgggtcattcttgctaaagtgggtttcttggtgaattacagtggcagctcagagctgggtaagaggagaaaatgccatccaataaggctggaggcagtttgaaagatgaataatataacatgcagtgatttcaaacttcacgctttcttattgaaagtttttcttccagtttggaaggcaagtttcaatcgattctcttgtctaatccctgcttcctgccaggctgagctgttgctgttttcaagaagaaacctgggccttgatttgaatgcttcaaacactcagtgctcaattagccctcttttgaatcctctctgacggttggttaaatatgggtcgaaagtgcttttttaaagtggaactgatcttgggttgaggtaacttaatcttccgggtgttaagacgctgaaaaataatgttttaacggaacaattactagaagacatggaaattgcattaggctcgtctgtccagttctattttatagacatgaacatttcaaagtacaaaaggctattctataaaaaggacacttggctattctttataaaggttccccttgtacttttatagaatgtttacaaggttaataagtatgcttttttttttatcactgtatattttaaatggcccaacgactgctcccacgttgatttgagaatcattgaaactgcctgaatggagcaggggtatcctttgtttcccattgatttggaaacaaaagactcaggggggaaagaaaagtttagtttgcttctgaatgccatatgcagatgaacgttctgctgataaaatacaccaaggatctgaaaactttttcaagtcttagaacaggaaggttactcttgcagtcacactgcatgtttgaacctgccttccatttttcatttctcccattgtgccctgggctaccatgggattacttatgtcacacacccaagtcttcggaaaaaaataaacagcagtcaatagaagagaaccaccatcaaacgaggcaaaagttgtctgctgtttcttacttaggaaataccccatggacatcatcagtaaataaggtcccccactttccccctcatcatttttcccaatttctctatatccaagattcccatccttggcgctaatatttacgactagaacattctttattgttggtggctgtcccgggcagtgtagggtgctcaccagtatctggtgacagtagctgttccctctacagtcatgaaaataaaaaatgtgaaaattgagagctgggcacagtgggttcacctgtagccccagctactcagatggctgaggcaggaggttcctttaagcccaggagttctagtcaagcctgggtaatgtaggaagacattgcctctaaaatacatatatacacatatatattttatatacaatatattatatattttatatacaatatattatatattttatatacaatatattatatattttatatacaatatattatatattttatatacaatatattatatattttatatacaatatattatatattttatatacaatatattatatattttatatacaatatattatatattttatatacaatatattatatattttatatacaatatattatatattttatatacaatatattatatattttatatacaatatactacatatgatatattatatataatttattatttatatataatatatattatagaatatatattatgtaatatatataatcataatatataatatatataataatatattatatatattatatatcatatataacgcatataatatatattatataatgcatataatatatattatataaaacataatatatataatacatacaacatataatatattgtatatataatacatacaatatataatgtattatatataatatattttatataatatattatatattatatattttatataatatattatatataatatattttatatataatatatattttatatataaaactaaaataaatgttatatataatgtataaatttatatacaaatataattatacataaatataaatatctagaatatagcatatatggtatagatcatatatatcatactatattataatatatattataatatatagtattatagtatgatatatactatattttatattatatactatatactatatgatatgcatcatatattatatgatatatagtacatactatatatgtatcatatattatatgatatataatatatataatatataacatgtaggatatacactatataattttatatataatatagtatacatattatatataagtatgcagcctaagcaatatggcaaaactccgtctctacaaaaaaattagctgggggtggtggtatgtgcctgtggtctcagttactcaggagtctgaggcgggaggatcagctgaacctggggaggtcgaggctgcagtgagccacgactgcacttcagcctgggcaactgagtgagaacttgtctcaaaaaaaaaaaaaaaaaaaaaaagtaaagtgtcaacgttgccaatgtttccaagaaggggaggtggggggttggcttctggttgggaaatactacttgagaaccatctgcccacagactcctgcttgagaaaagaagaggttagttaaatgctcagccagttataatgaaaacaactggttacaaaatcgtacttttagtcagaattcatagagtagaacttaaaatagacaaaaggaaagggaaataatgcatcaagggacccagagatcacagaatagccagcccttcattttcaggtgagggcctctgtgggaaggtgcgttccaagccacacagttggaagttgagcgaactgaaccaaggctgggcttttgtgtttgctgtttaaacagtgtgtggttttactcacctaccatagtgctcctcctactggtgggcaccttagagtaggctgaaaacaacgtgtctcactgtccttttttgtttgtctctgagtatttttccttatgatcttgaagtaacatttacttaatttgcaatgaatgaaaacaggcatgtacagcaatcgtttaaaaagtatattttatgaggttttgtaaggataatagattaaaaattattgtagtgactgtaaataaatatggctataaaaagttaaattctttttggcatataagatacatctttgctcctttagtaggtgtagtttacatcaactattttgttatatatctaaaaaagagaagccatgcccagaaccaagtattccaagtcctataatcataaaggtaatactagtaatgagtgtttcatgtttactttttaaaaaataagttttgaattatgagctgtcctgagcaatagcacaggtggacagaatagcatcacaaacagtcctgagctcagcactctgcttgactggttttgagctctcctgtttcagggtcttttcaggtccttctggccaggaaccgtctttcctttgcagggctcacaccttccttccttcatgcaagcctctgctgagatgttatctcttcggacaggtctcctgactgctctatttgtagtgaatgcaactcctaaatgtattctgtatcataaacaaaaagcaccctccatctcccctggtcactcttcatagcacttattatatatttgtttgacttatttattgtctagcttatccaactagaatccaggctgtgactcgctgagggctttgttttgtctaccaatacccagaaggatgcctgttatactgcaggcactgagtaaatatctattgaataaaagtattattgcctgggcaaactttgtaggcaagagcaggctagtaacagtttggtgtaggttgatgaattcttacactctggtaaatgacctttgtctttttaagtataataatattatgtttaatgtttaaatggcttaacacgacaaattatatttccaagagttaatcatttatccatcttaaataacaggtcttgttttcagtagagaaaagtttaagaagaaatataaaaaatggcctttcagcctactgatcagagaagccctagtgacacttaaacaagcaaacaaacaaataaaaacacgagtttaggctgcggctgctcatgcctgtaatcccagcactttgggaggctgaggcaggcagatcaccagcctggccaacatggtgaaactccgtctctactaaaaatacaaaaatttgccagacgtggtggcacatgcctgtaatcccagctattccggaggctgaggcaggagaattgattgaacctgggaggcggaggttgcagtgagccaagactgggtcaccgcactccagcctgggtgattgagcgagactctgtctcaaaaaaaaaaaaaaagtttagagttagaaacttaaaattttatggaaaggtacagaataaaaagtggcagatgttcccctgtgtactttcttgttcctttcataaaaataaaactcctgtaactaatttctcatggattgttccagaaaaaattttctatgcctataggcataactttatcaacaaaatacacattctcttaaattgctttaaagatacacacacatgcacgtgcacttcccagaagtttctgtaacaacccttgcacaatttatacttagatatttatttgcacaaccatattgtgaatatcacctccacctgtctgcctgtcccctgttccctccctagtgcctggcacgcagcaggtaatgacctattcattgagtgaataactaaactagtacatcctcgtttaacagaaggcactatgcttttattaatgcaccctgacaaacagaattcttataccactagttaagttcttcaagattcatactcaatgaatattgatggtttttttaaaaattgattttgttctaggtgctttcacatgaatgggatcctcaggctaatctcctgaagtggttattttaattcctgttcttcagatgagaaaatggagactcacagagttaaagccaaattatataataagagcttaattctaggaaaaggttctaggcctttgtgccctacttatatttctaagtctcttcctttctgctagtttcaaaagtaagaatgctatgaatgtttaagcttagctctgaataccaaatatttctgtacagtctgtcatgctacaaaggttcatttcaaatctaattagcccagcagataaaacaaggagctggagactctaaataaaccactaacaaacaaaaaacacctctaacacaaaagaaatctcttgatggtgtaaaaactaagcaatgtggcttctaagaacgtggcttctgaacagctcagaatcaaaacacaggaagtaagctgttaatggcacaatgaaatgaataaaaactattttgggggtgaaccagaatttgctctgctatttactggttcgtgttcaaagtggggagaggggccttggggtcaagagtttccccagtggccctatttccaagaagaaatagccaatacacaactctgtaaaaaaattaaaaaacatggaattgcacacttaaaatggatgaatattatgatatgtaaatcatgtctcaatcaagctgttagaaagaaagaaagaagaaagaaaaagcaagcaagcaagcgagccaaatttaatgcggttttactttgccagctgtcagctggtacagattttggtcgtgtgtggtgtgtgtgtgtgtgtgtgtgtgtgtgtgtttaaaaaatgtggtctgtgatccagagcataccaggatgtgggagactcacaggttactgtttaatattatatagaaaacgtgtgcagagccaaggaggggaaaacagttctgtaattaaaagacaggactagggcttcctgagatgtaaaaatagatgaaaaaggtgaatcttttgttctgtgggtgttgccacaacgtcacctactagggtgaaactgcagtgtgtaccactcgcctcccacttatagctggtccgttgattccgttgactcggaatagcagccttgttccatctgctggagtcagaggtttatggaggcagaaagtgtgtggaattatttccaaaaaaaataatcacaggaacggggagagggagggaggaagagagagagaaaaagagagagagagagagagagacagagagaaaggagaaatgaattttcagaatagaatgaggttggctgtgtttgcattaaaacatttaaatgaacactgcaaaagctataaactgatgcttccttaagaagagctgttgggattggaccagaaaaaagaacctcaaaagggaagggatgggcaggagggaacttgctactgagaggagtagggtttgcaggtttgcagttatacctgttgctgtggtttgatgcccctgtgactgcgaggcaagaaaaagtaggtggaacgtgaggctctctgccagccaaggggccaggggagaccccacacacactctgcatcagtgcctcaccacaggaaggaggataaggacaaacaagcaccccctccatgccaaacaacaaaacaaaaccttcttattcaatgtaaaaggaaaaaaaacccaaaaaaacaggtaaggtatttcccactctcccacttttttttttttttaagagcgagagtttcactcttgcccaggttagagtgcattggtgcaatcctagctcattgcagcctcaacttcctgggctcaaccaattctcccactttagcctcccaagtaactggaactacaggaatggaccagggtggccggctaatttttaaaatttttttgtagagacagtttcattaagttgcccaggctggtctcacactcctggcctcaaaggctcctcccacagcgctgggattactggcatgagccacagtgcccagccaactgaggtaattttttttttttttttgagacagggtctcgctctgtcacctaggctggagtgcagtggtgcaatctcagttcattgcaatctctgcctcctcagttcaagcgattctcctgtctcagcctcccaagtaactgggattacaggcacacaccaccatgcccggctaatttttgtatttttataagagatggggtttcaccatgttgaccaggatggtctcgatctcctcacctcgtgatccacccgcctcagcctcccaaagtgctgggatcacaggcgtgagccaccacacccggcctcaactgaggtaattttttgagaaattctgggcaaatgccctcacttaccactgatcataggtttaaaaacgccaataaaacttgtttattgcttaagactagggcagtagttaccctgctggggaagtgatagaagggggtgcagaggtgtccctttgtgaaaacccatcaagctggatattcctgatttttccactactgtgtatctaggaaatatttgactttttttcttttacaatttttacaaatattgtttattttaatgaagctggtgtagacaatgtccatttaaaacccgatatcccaggccaaaaagtacaaataaaaaagagcagtattctgttgtattcatttctgcatgtatacctttattgataatgaaaatcagaacttttctgggatcttctgacaagattaagaaaaaaaaaatcttcaaatgtcttttcttcagggaagccatctttggagttagtcgttactctcaaccttatctgtcaccttgacttaacctgatgctccttttcttttggtccagaccctcaaatcttaaaaatagcttcaagttgttaaggagaggtcatttttccacagctcagttctctaaaaaacttccatctcccaccaaaagtcatagtccaggagtgaaacaatcacatggttgaaaatcagggccaactggaaagtcattatgaatacttgcattggtcaatcttatcatctgaaaatgtacagtcctgaaaaaggtggcctctctgtgcacacataatttttataaaaggagagggcaatatgaagaggcctgagccttgatcaccagaaatcagcataatgaaaacaaacaataatgaataatgaacactagaattcaaattaccagatgttttaaagagatggagtgcctgttttcaattccgttttaaataccatgctacaaaagaactatttaaaaaaataaaaaaggattgagggaaaaggaaaaaaaaaaagaatgtctaaactgttgaatgacctccgatttgttcctgataaacctcaatcacatcttcttcctccattcccagttcttctggagtatgattatcagcaattctctgaccttcaaagagaaacctgagggaattcactggaacgccctgtctctgacagtacgatttcttgagtttcttgagaggtgttgtcattttcactttgaaatgaatctcactgctatcctgtccaataaccctgagtttaatatcttcatcttttatcttatcccccaaatgctcagttgaaggttttgcctccaggtcagacatggtgatggggcattcacctgcaggtctccgaacagcagcagtctcggggtaggcagaacctcgctctggcgtttacaatgccatctcccttcgtcacagcacgacaccatggcggcagtcacttccgctatgcctcacgacacttctgctacgccttgcatcacttacggtgcaccttgcatcacttccgctaggcgcagagaggagggagggagaagagctaacttttttttttttaagtaccgatatgtattccctgttcctgcttcctcatcaatttcaaacttaacatgacccaaagagaacttgggttctctgttctcaggggctgccagccatcttttcccagcctcactccaacaacttcagcacatccttgattcttctttctctaatctcctcacccagtctggatagcctgttgtctctccctctagaacaggtctcaaatctcctggctttaccccatcttcatcgagctggccgagtccatgtagtattttggctggacaactgccacacactcccagttggtttaccccctgcttcacttgtctccctctccagcgaatccattctccatttccatttgattttattttattattttattctatttcattattattttttgagacagaatctcgctctgacacccaggctggagtgcagtggcacgatctcggctcaccacaacctccgcctcccgggttcaagcaattctcctgcctcagcctcctgagtagctgggattataggcatgtgccatgatgccaggctttttgtattttttagtagagacgagttttcaccatgttggccaggctggtctcaaactcttgacctcaagtgatccgcccgcctcagcctcccaaagtgctgggattacaggcatgagccaccgctcccggcccccatttccattttataagaatggaaatcagataacgacattctccttctgtaaaacctccccatggcttcccttcacattgaaagaaccacccaggctagggagaagccttctggtgtcacacaagaaaagccatggccacctcccctcatcccttccctcctccctcttggtcattgtgttctggtctccttctgtccctccaacatgcgtagctcattccttcctcggcgactttgccttgctgtcctctgtcccaggtctcggccctaatgtctcctcgccacaaaggctgtccctggtcacctgtgtggttgccactcaccgtctcatcaccttcgaaacccctgtcactgctggacatgtgatcttacctctttgttttgttgtttattggatgtttccctcattaggatataagtgcccagaggggcaagaactgtctaccttacactaccctacactacttcgggtgtataaaaacaatttgaatggtcacatgcttaaaacccgattcctgaacttcccattcccaccgtcagcgcctccctcctgtcctgatcctcccctggtcttcccctctcagcgcacggcaactctattccttcagcggctcagacccagatattggaggagtccggggtgccccttttcccctcacattccacactcatcctgtccgcaccttcagttgcctttaccttgagagagcctgagaccacctctgtgtcctgcttccgccctggtctgggcagccacaggggttcctggagcttcctgcagtcgctgcacttactgtctctacatccccctgtgccctccttcaatctagtctctggagtgaggttatttgaaaatcatttccaatgccacatctctttccagagttctccaaagacggccagctcagagtgaaatctaaagccatttagtcacatcagcccaaatgcccctctctgaccggctcgcccacctaccatccttttccttgcttattccactctggggacactatctaagggcacgcctctgaggccctgtgagtctgctgctctctttctggaaggacctctcccagatgctactcagtgctcccttccttgtggaggtctctgctcagtgaggtcctctccagcgtctccctttaaaattgtcccctcgggacaggagctgtggctcctgcctgcaattccagggctttgggaggccaaggtggaaggatcacttgagcccaggagttcaagaccaggctgggcaaaatggtgaaaccctgtctccacaaaaaaatacaacacttagccaggcatgatggtgcagacttgtggtcccagctactccggtggctgaggtgggaggattgtttgaacccaggagttggaggctgcagtgagttttgatagtgtcactgcattccggcctgggtgacagagtaagaccctgttcttttgttttgtttttaaatgcccccttatacacatggtcctcccctatctatctccctattttttctccagagcacttctgactcctcagacgtgtgtcgtttttattatttgttgatgctcttctcccactacaatgtaagttccacgtgggagtggatttctgtctttttgtcactgtggtatcctcatagttcaaattggtgcccagcaggtattaaacactcatagatatttgctaattgaatgaactagtgatgatgttcactgttgaacagcatacggtacaaatctaagtcctcatccagtgagcgaattaatgataattaaaagaaatttaccaaacttcaaactcactcaatcaacaaagatatatagagtttctattgtaagtctggaactgatctaccctgatctacagtgttgaatgaaatagacgagatctctgaccacctgaaattagcagtgtacttggggaaaatccactgatcaaagaatcatagaaacgtttcatcacaaacttggtactgctggcaaggaaaagtcaagaactctcggagtgtagttccatttgagaactaggagggcttctgtgaggaggtgacatctgagctgagatgagaaggttgagatggtgaagggaagaggtacaggggtggagaatggggagaaaatttcaggcagaagaaacttcagaggcaaagtccccagtccctgggtaatggttaatcatttacatcttactgcttccaatattctggtttctgatgattactatgatttaacttcattttttagctaccagtaaaatattggtgataatttgcattctttacctccatattggagggatgggaaatgcctccaaacccaggattctaattaaatttgggagaccacagagtttatgcagcgtgtggttggatttttacatcatccttgtttgttttcttctctttccagtccttcgacactggctagtcattaaaatttagagctcaccctaggttaagtggacaatttcctggaaaacagctggttgagctcccccctgtgcatcgctgaaataaacatcccctttggaaaaaggcttcctttaataccttcctgcttagcatctttttgcagtctatattcctgttttgcatgacttctcagaaaaaatctagaatgataagtaaaataataggcaaggtttattaagcacgtcattgcttcacactaccgtcctgggagctaggcactattattatcctgtattcacagatgaggacccgaggcttgggaagctaatgtgtttcacaccagtcaataatgagcagaggcaggtttaacacccaggaccatgtgactcaacaacttgtgctcttaaccattgagccacaaggcctccctggccctaaacgtgaaggtctcctgtcagtttcaatttccccagctgttacatgaaggcattgcaattgcacccagcattctacagtagctgtgcagagggtgggattggtgttttctcttgtagagggaaccaactctatcttaacctaaaacttggctgggcgctggggctcacgactgtaatcccagcactttaggaggtggaggagggtggatcacctgaggtcaggagtttgagaccagcctgaccaacatggtgaaaccccatctctactaaaaataccaaaattagctgggtgtggtggtgcgcgcctgtagtcccagctactcaggaggctgaggcacaagaatcgcttgaacccaggaggcggaggttgcagtgagctgagatcgcgccactgcactccagcctgggtgacagggcgagactccgtctcaaaacagaacaaaacaaaacaaatcttgtgctaaaaaagtttaatacatggatgttgagtaactcacaggtggagaaaggagtcctaagaaacaaagaaatacagaggcagagaggaagaagagaggaggagtaggggggtggggagagagagagagagacagacagacagacagacagacatgagctaaggcctagctcccaggatggttgtgtgaagcaacaacaagcttaataaaccttggctgttgttttgtttattattcttctagatgtttttgtcaaaagtcccacatttctagggaacagaaatgcttcttgagaactttctgctggaaggggtgagctgcaattctgttttctactccatgtcactctggtaaagattctccatccctgcaattagagtttgatgatttgccttggccatggactcattccttggctgagggagaacaggctgtcttcattaacactctgctgagatggctgacaatggtttgtgagggtagataatccgctcaagtcgctgtgtaacccaaagaacccgaaatgaatgctgggcttttcaaacccagccattactcttccttcctcgtggtcacctcctgtagaaaggctggaagtgaaacctaattcagtctcgattctgtcttttgctcccacttttgagagctcatctttattcagaaggtgcctggtacggtaccaggcacgtagtaggtgcttagccagccaatggtggggcaaataaatgaatagaaaagaaaaacacatcctcactgtttaacaattgctcccttcaccgaagctgcctaaaagaagacttccttctgctgggctttttgaggaggtccaacgaatagccctttcttccctgcctggcttcttaagcagctgagccataagatagaagaataagccaaaatgtgggcctggcacggtggctgacgcctgtaatcccagcactttgggaggccgaggcaggtggatcacctgaggtcaggagctcaagaccagcctgaccaaccaggtctctaccacaaatacaaaaattagctggggcatggtggcgtgtgcctgtaatcccagctacttgggagggtgagacaggagaactgcttgaacccaggagacggaggttgcagcgagccaagatcgcaccactgcactccagcctgggtgacacagaaagactcgccatcacaaaaaaaaaaaaaaaaaaaaagcctgggtgtggtggttcacgcctttaattccagcactttgggaggccgaggtgggtggatcacgaggtcaggagatcaaggccatcctggctaacacggtgaaaccccgtgtttactaaaaaaaatacaaaaaaatttagctaggcgtggtggcgggtgcctgcagtcccagctactcagaagcaggagaatggcgtgaaactgggaggcggagcttgcggtgagccgagatcgtgccactgcactccagcctggcagacagagtgagactctatctcagaaaaaaaaaaaaaaaaaaaagtcaaaatatcacctttattgctgaaaagtctataaatatgtgtgggccacagggcttgccagcactgaccagaattaggcaacccctccaactccaacaggaacagagaacacaagatccatgggcaactccctcctacccaaatatacaaggagcaggtggcagctcagccgctttcttcttccccaatctaccagccagatcaatcactcctcttgcagcatggagtggggaaggggcagagacaggccaggagttttaggagctgggctttcttctgggggaagatgcctttcctcccagcctcctgactaggcccctgtgggcctagggatgtgcagaaggggtgttggccccaagctgataagaatctactctgcaagtcctgttcattctctgtgtggctatctactgattactttttcacagcctgtgactaaaaaaatttccgttacctgagacatgatattaaaacgcctggttttgaaaagtagggtttgtcaaatgactgtgaaagttctcttgcaacagaaaagtaaaaatccctcagaaaagcaagatctaataattcaaaaagcaagatataataataataattattatcattgactgggtgacatccaaaagtcagtttatccaatgccaggaactgaaatgtctggcccgccaggagaacagtggctgagctccatgatgctcctgagtttgaacttttgctctgcaccttgtcagctgtgtaaactgaggcttgttacatatgtgtgtgtgtgtgtatatatatatatataattacaatttttcatgttcgtaggtctatggtaggtgtatatacttatggtgtgcattagatgttttgatataggcatgcaatgtgtaataatcacattatgaaaaatggagtatccatctcctcaagcatttgtcctttgtgttacaaacaatccagttatacttttttagttattttgaaatgtacagtttaactattattgactatagtcaccctgttgtgttatcatatactaggtcttatccattctttctaactttctttgttctttgtacacattagccatccccaccttcccccaccctaccacaccaccccatcccctctcccctgccacccaaccccacacttccagcttctggaaaccatccttctcttatctccatgagttcaactattttgattattagatctcacaaataagtgagaatgtgtgattttcgtcttcctgtgtctggcttatttcagttaatatgatgacctccaattccatccacatcgttgcaaataacaggatctcattcttttttatggctgaatagtactccattgagtatatgtaccaaattttcttgatccattcatctgctgatggacacttaggttgcttccaaatcttggctattgtgaacactgctgcaacaaacataggagtgcagatacctctttgatgttctgatgtgcattcttttggacatatacccagcagtgggattgctgggtcatatggtagctctatttttagttttttgaggaacctccaaactgttctccataatggttgtactaaggtgcatttccaccaacagtgtatgcgggatcccgtttctctacatccttgccggaatttgttattgcctgtcttttgaatataagccattttaactgggttgagttgagatctcattgcagttttgattttcatttctctgatgatcagtgatgttaagcaccttttcatatgcctatttgctatttgtatgtcttcttttaaggaatatctagtcaaaccttttgtccattttgagtgggttattatatctttatattttttattttttttagacagggtcttactctgtcacagaggctggagtgtggtgactcaatcatggctcactgcagcctcaacctcctgggctcaggcgatcttcccacctcccaagtagctgagaccacaagcacaagcacatgccaccatgcccagctaattttttcttgagatggggtttcaccatgtttcccaggctggtcttgaactcctgacctcaagtgattcacctgcctcagcctcccaaagtgctgagatcaaaggcgtgagccacctcaccaggccagatttttttcctacagagttatttaagtttcttttattttctgattattaatcccttgtcagatgggtagtttgcaaatattttctcccattctgtgggctgtctcttcactatgttgattgtttcctttgctgtgcaaaagtcttgtaacttgatatgataccatttgtcaaagcttgttacttaatccatctggaccttatttacacaactataaaatagggatggtaatagcatccattccttaggctttttagtggcgattaattgaagatatatatgcatttcaaacacacacacacacactagtgcctggcatatagtaagttcctaataaatgtggttgatactgttatatgatttgtattattggtgatgatagttggggtccttgggtcaccatgaaatataagttattcactcttattatccccgttgtctatttgctaatgtgcaacagaagtgcactgggatgccgggtgtggtggctcatgcctataatcccagcactttgggaggccgaggcgggcagatcacttgaggtcaggagtttgagaccagcctcgccatcatggtgaaaccccttctctacaaaaaataataaaaaaagaaaaattacccaggcatggtggcacatgcttgtaaccccagctacttgggaggctagggcgcgagagtcacttgaacctgggaagcaattgtgccaagattgcaccactgcactccagcctgggtgagagcgagactctatctcaaaaaaaaaagtgccctgggagagcagtctgggagtccaagttcaaatccaatctctggtgttttctactatgtgataattggcaaggtcactaagcttctttgagcctcagtttccttgccagttatgagtgacaaagaatcagaggaaagatcaatttgaccttggaacaggaactttgtgctccctggagcattctttccttccggcttttctttagttaatacctgttcagctggctgctgcctctgtaggggagccctccacaacctcctagacagagtcaactcccctgctcttatcccattgtgtctattcacttgctccacaaattttaatgagcaactaccttccagacactgctctaaggtcagagtgatgaacaagcaaaacgtggccttgggctttctaaattgggaagaaaaagtcaagggactctcctacaatatcgtgttctccaaggtgaccttctctccccaggtgggcttgttctaggttgtggacatgatccacatgctccagacctaggaacacacacacacacacacacacacacacacacacacattcacttaccttctccctagactagaaaccttgtaaacctacatatcggtttctagctgagaatacattgaatttccccaaaaatgttctcccagcctcaggactcctctgcaccccagactgagattattcagaggcgttacttagcctcttctgagagctcctttctgaacattatggtgttagaggagcaccaaggctctgactcaatctactaagaggtggggttcactgaggggctccaccacaggcaaacaagtgcaggaaacagcataaaaccaaaccaaccagaagtagataggtcatttcctttctcactcctgtctgggatgcctttggcaagcttcactgggaaaggaggagccagagagctgagctattaacacacctgagtgtcctcactctgccacttagtaccagcgtggcctcaggcgaggagctaactcattttaggccttggttgcttcatctgtaaaatgggatgatggtgttgacttcataagatcaacatgcgtgctaatggtgataacacacgacaagtgttcactattatgcttgcagcataactgctgaataaatatgagctactattactattaggatgcatgccattcttcttacataagagaaagacaaaagtggtttgatgaaaatacgtaacgaataaaatacacggaatatatgattcttctctcccccccaccacgctcccccacccacatggctgactcatgtcacttttgagatcacggtggaaatgtcatctcctgagagaaggctgtcctttgaggcagttattcccaaccttggctgcacactgaaacacctggggagcttttccaaataatggtgctggttcaacccccagaggtgctgcctggatgtggacttttttttttttgagatggagtcttgctctgttgccaggctggagtgcagtggcacaatctcagctcactgcaacctctgcctcccggtttcaagcgattctcctgcctcagcctcccaagtagctgggattacaggcatgcgccacctcgccccgttaatttttgtatttttagtagagacggggtttcagcatgttggccaggatggtcttgatctcttgacctcgtgatccgcttgcctcagcctccgaaagtgctgggattacaggcgtgagccaccgcgtccagcaaggatttggagatttttaagtgctcccagggagctctagcgtttagcccagctggagagtcactactgcttttagaggcagtgtagcgtggtaactgaaagcacagccctggagccagacttctcaggttcgaatcctgattctatggctcactagctatataactttgggcaagttatcaaaactcttaaggcctcagtttcttcatatgtaaaatgggtataacgatcataacagacctatctcacagtgttgtgaagactaaatgaattaatatatggcatagacttagtgttggaaagacacggagtgttcaccaaaaataaaatttgaaggccctccctgccttcccaccatctggatggacccccttcctcagccagtgcactccaaatttaacctgaaaggctggttcaggccatgacaggaaagagggggaggttggacatgcctcattatgccctcctcccttttgtaattcaagaaagccaatgagcatttaacatcaacatagaccttaagtctgataagaaacatttacaatctattctctctgaagcctgctacctggaggcttcatttgcatgagaaaactttggcctctgcaaccgctgattgtagcccagatattcctttctatggataataactttttcaaccaattgccaaccagaaaattctatttttaaaaatttttatttatttatttgtttgtttatttatttatttatttttcagacagagtctcactcttgtcacccaggctggagtgctgtggcacgatcttggctcacttcaacctccgcctcccaggttcaagcgattctcctgcctcagcctcctgagtagctgggattacaggcgcctgccatcatatccggctaatttttggacttctagtagagacgggatttcaccatggtggccaggctggtttcgaactcctgacctcaggtgttccgcccacctcggcctcccaaagtgctgggattacaggcgtgagccatcgcgcccggccgccagtcagaaaatttaaaaatctacctatcaagatatcaaaatctacctttccagcactaagtctgtgtcatatattaattcatttagtcttcataacactaagagataggtttgttattatcataggtagaacctggaaccaccttcccctcaccccgcttaaagttgtcccatttttctggactgaaccaatgtatatcttacatgtatttgatgtcttatatcccctagaatataaaagccgagctgtgccctgtccaccttgggcatatgttctcgtggtctctcaagggtgctgtcatgggtcatggtcactcacatttggctcagaataaatctcttaaaaaatttcacagagtttgactcttgttgttgacaatagcgaggtctttagttttaattccttttttattttaattttaaatacatttttattgtggtagaatatacataacataaaatttaccattgtagccattaataagtgcacaactcggcggggcgcggtggctcacgcctataatcccagcactttgggaggccgaggcgggcagatcacaaggtcaggagatcgagaccacggtgaaaccccgtctctactaaaaatacaaaaaaattagccgggcacagtggcggcgcctgtagtcccagctactagggaggctgaggcaggagaatggcgtgaacccgggaagcggagcttgcactgagccgagatcgcgccactgcactccagccttggcgacaaagcgagactccgtctcaaaaaaaaaaaaaaaaaaaaagtgcacaactcaatgggattcaatgcatttccaatgttggatgaccaacaccaccatccattgccaacactttttcatcatcccaaacagaaactctgtactccttaaataacaaccccccattctccccagcagtccccgagcctctattgtactttctgtctctgtaaatttgtctgttctatgtacctcataaaaatggaatcatagaatatttttctcttgggtttggtttatttcacttggcataatgttttcaggtttcatctatgtcatagcatggatcagaattccacgcttcttatggctgagtaatattccattgtatgcacgtacctgtttatgcatttatctgttgatggaatgtggctgtttctaccctttggctattgcaaatatgtgctatgagcattgctgtaaaaaagtatctgtttggttgggcgctgtggctcacgcctgtaaacccagcactttgtggggctgaagtgggcggattacctgaggtcgggagctccagaccagcctgaccaacatggtgaagccctgtgtctactaaaaatacaaaaattagccaggtataatggcgggcacctgtaatcccagctactcgggaggttgaggcaggagaatcgcttgaaccagggaggcggaggttgcagtgagctgagatcccaccactgcactccagcctgggtaacagagcgagactctgtctcaaagaaaaaaaaaaaagtatctgtttgatacctttaattatttgggtttatacctacaagtggaattgctgggtcatgtggtattctctttaatttttttgttttcctcagtggctgcatcattttacatttgctccagcaatagacaaaggttccaatttctctacatcctcaccaacactcattatttttggtatctcattgtggtttagttataattccttttgatctcatccaaagcagattacccactacctgtcatcctctcacccacagaacgcaactctttgcttccatgctggtatcacagcgtggcctcgtgtttgttgaacgtttgccttgctgagcagcccaggagttggcaaactgtggcctggggctgcaggtgaaacctggtggctgcttgtttttgtatagtccacaacctaaagatggtttttatatttttaactggttaaaaaaaaaaaaaagaaaaagaatattttgtgaaatataaaaactatataaaattcaaatttcattgtttatgaatactcttattggaacacagccatgcttacatatttaggtactgcccatggctgcttttgccttagaaggcagaatagagtagtggcaacaggggctgtatggcctgtagagcctaaaatattcaccatgtggccctttagagaaaaggtttgctgaaccctgcactggaccctgaactcagggacagtgatcctgccgtctccagggtgcctggccattggtaggaaattaacaaatagtcatcgtattggttcattctctcatactaactccagacacaaaaataaatttgagttagatcagagaactaaatataaacttagagtattctagaagaaaacatagaataatattgtcgtaggcttgggttaggcaatgatttcttaggacacaaaaagcactaaccatcaaataaaataaataaattggtcaacattaaatttttaagctttgttcatccaaagatactacagaccaatctggaacctgccacatgtaccaaaatccatgtatactcaagttccccagtcggttctgtggaatctgagtatatgaaaagtcagccctctgttttgcaacctgaaaatactgtattttcgatttgcagttggttaaaaaaaatctacgtataagtggaaccacacagttcaaacctgtgttgttcaagggtcaactgtattaggagaataagtagacaagccacagattgggggaaaattttgcatatgtgataacttgtatccaaagtatataaagaactacaaataataatacaaagataaacacaacttttaaaaatgagcaaaagacatcgaagtgcaatttaaaaccacaatgagatacaatttcatgcatattagaagagcgaaaaaacaaaaacaaaaaaggaaacaaatgttggtgaagatgaagagtaaccagaaggctggttcattgctaaagggtgtacaactgtctggcagtttcttatagactctactcttacgtattacccaagagaaatgaaaacctgtgtctacacaaagacttattcatgaatatgcgtagcagctttattcataatagccacaaaccggaaacaacccaaatggcattaatagcaaaatagattttttaaaaattattttattttattttttcgagacagagtcttgctctcttgcccaagctggagtgcggtggcatgctcttggcttactgcaacctctgcctcacaggttcaagcaattctcctgcctcagcctcctgagtagctgggactacaggcgcctgccaccccgactgactaatttttgtatttttagtagagacagggctttgccatgttggccaagctggtctcaaactcctgacctcaggtgattcacccgcctcggcctcccaaaatgctgggattataggcatgagccaccgcatccagctgcaaaatagattttttaaaaatgaggtctatctatacagtgaaatatgattattcagtaagaaaatggaacagacagtccatgcaacaacatgaatgaatctcaaaatcacgtagagtggaagaagacagacatgaaggagcacagtctgaattattccatttctatgaaattacaggaaagattaatctatagcaaccaaaagcaggttagtcattgcctctggggggtggggcatggggcttggcattgcttaacaaacagcccatggtgctttctgggctaaaggacacattcccttacttgttttgggtggatgttaattacaggggggtatatcattctcaaaactcagaactgaacacttaagatctgtgcttttattgtatgtacattatgcttccttttagataatgggagaggaacagctgcccttgaaaggtgacaaaatattccttcatagatggacagtgtccaagtgtcagcccccattctggccttggtgagcccagttggattgtgaaggaaacggagaaagcatggtgccctgatgtctgtccactgcgaatggcgtttcctgttttaaccagacttctcttgtgaaggaaaaaatagccatcactccatgagcccttcaattgccagtctagaaggccatttcctggccttgcgaaaaaacgacagcaccctctgcccagcctagaacatcttctacctgctgggccctgctggtggctggggcccatctgaatgcaatcacttgtttgtccctggccagggagaacatccttccagcagccttgcctggatctgctgagtgagcacccaggctcccaacactgcaggggagggggagaagcagaagcagtgattgtctctacttttatttttagatgatcagtgagacaaagctgcctgcatgaggcaagttgtcaagacctctgacttccttatggatctgaagccagcttctcagtcttctctcattgtatcagtttcctatggcttaaggataacaaatgtccttaagcactaagtggcttaaaacaacacaaatgcattagcttacagttccagaggtcagaagtccaacacaagtctcatgcagctaaaatcaaggttttgccagttccttctggatgtacaagaggagaatctgtttccttgccttttccagccttagaggctgcccacattccttggctcatggcctcttctccactgaaagccagcagcgttggctctctctgtgcctttcttctagagtcacatttctttctgactacttgactgtcttcttcttccacttttaaggacctatgagattacactgggccacttggataatccaagctgaactccttattttaaggttagctgatgagtcaagctaattctgtttacaatcttaattccctcttgccatgcaagggaacacagtcataggttttgggaattaggatgtggatatttttagagagccattgttctgctgattgcactccctgatgttcaagtccaactttaactcataagctccttactctcttaaaatggccctaggttgatagtttggttccaagacttataaggtgtgtggataatggtaacagcaacagcaataattacagcaaccatacaccaagaacatgctatgaagcaggcacaggagacacatgatatcatctgatccctgtaggacctgatggagtaggcatcatcatccctattatagatggggaaaccgaggcctgggcagtataaataatgagcccaaggttactcggcttttagatggcagattcaagattggaactatagcttgcctgactttaacgacttccgtcctgacagcaaatgactaaatagcaaacctctaccctgtctccaagtcaagcttcctctgagcagagattttagatgaggaatagagatgatgtctgtccaatgcttagtgcaaaagagaacccaagacatggaagtttagttaggtagcttaaaaacaatattattggcctggcgcagtggctcatgcctgtaatcccagcactttggcaggctgaggtgggcagatcacctaaggtcagtagttcaagaccagcctggccaacatggtgaaatctcatctctactaaaaatacaaaaattagctgggtatggtggtgggtacctgtaatcccagctacttgggaggctgaggcaggagaatcacttgaacccaggaggcagaggttgcagtgagctgtgattgtgccactgcactccagcctgggtgacagggcaagactctgtctcaaaaaaataaaaaataaaaataatattgttgcctctatctcccctttccctttccccttctctttccctcccctcccctcccctcccctcccctcccttcccctcccttctcctccccctcccttcccctcccttctcctccccctcccttcccctcccctctcccttcccctcccctcccctcctctccctggcatcttttaaagtgggtgacaatggggtaagggtttagatctaggctctaagtttaggctacccaggttcaacttctaatattgtcacattagctgcttccacttgggtccacctcacccctgtaagcctcaagttcctcctcatttgtaaaaatcgtagtgtgatactatctgccttgccaagtgctgggtggattagaaacaatcatgcatgcatagcacacggtaaacgatcactattaagccactcccacatgtccattattgaagcaggtggtgtgaacaagagaggcatgtatggtctttgttcacaagcatctctccctctctccctcagcctttctttctctgtcttttacacacacacacacacacacacacacacacacacacacaccagttaatgacatcaagggggaagttaggaaagatgaaaaattggagaccaagacggtcataacatggttctaatttgtggttaagaaattcatgaaggaataggtcaatgtgtacccagagaaaggaaagattcacttatgaagaacgtgggagtgaatcacaagactgtcactgtctgcaacccttgaaggggccccttgaccatcttgctgggcgatttgaatcaccagatgtggtctaccacagtgtctctcatgccgctgctcacatatgaacttcatgatttttgccatatctcttgctgccttgtttagtgttgacttaagatttttctttcattatttggatattgactacactgacataaaaaggaaactttatgtcactatggtaaatgggaggctgattttcttgccacagatagaaactgtgaaaaaaatacataccgtttttttttttaaagaatgctttttttaaactttttttttaggttcaggggtacacgtgcgggtttgttatataggtaaattgtgtgtcatggggttttggtgtacagattattttgccacccaggtaataagtatagtacgaataggtagtttttccatcctctccccaccccaccctccacccttaagtatatatgtgttcatgaaaatacacaactattaaaagtaatacagccaggtgcagtggctcatgcccgtaaccccagcactttgggaggccgaggcgagcggatcacctgaagtcaggagtttgagatcagcctggccaacatggtgaaacctcgtctctactaaaaataccaaaattagccgggcgtggtggcgtgcgtctgtaatcccagctactcgggaggctgaagcagaagaattgcttgaacccacgaggcagaggttgcagtgagccaagatcgcatcactgcactccagcctgggcaacagagcgagactccaccacaaaaaaaaaaaaaagaaaaaaaagtaatacataatgttgccgatagctctctgaatacccttctgtatcccaccagtgtttggtataacatacttcagggtgcaccactcttgcagaaaaagctgaaaattctgtatctttagttatttgattttttttttgttttagaaatggggtctggctctgtcacccaggctggagtgcaatggtgccatcatggcgcactgctgcctgaatgtcctgcactcaagctatcttcctgcctcaatctccctagtagctgggactacaaggcgtgagccaacacgctggctggatttctgcatctttaggttcttaatccttaacctttttgcttctcagtttctcatcattagaatggggctgtttcactgtgcacagtgtctcacacctgtaatctcagcactttgggaagccaaggcgggagaatctcttgaggccaggagtttgagatcagcctgggcaacaaatcaagatctccatctctacaaaaaatttagccaggcatggtggtgtgtgcctgtagtcttagctattgaggaggctgaggcaggaagatcacttgagcccaggaagttgagactgcagtgagctgtgaccacaccactgcactccagcctcggcaacagagcaagaccctgtctcaaaaaaaaaaaaaaaaaaaagagtgaggatgtttataaaaagagtcattattattgagaaatgactgagctgagcattttgcacccattcgttaatatagccttcataaagtttccataatgatgtggtattattgaggtggtatctatgaggccaccgaggcacaaagaggtagttttgttctgtcacacagcttgtcactgcaaggagtgcgaacccaagaccatctgaacatgaagccttgacatcctgcagtcctgcctctctgtgctagccacttcatgggggctgagagcagccgaattaactaacgatgaagaagatgcactggggataaagaggagaggctacttactggtgcttgccgtgggccagagactcctggaagtactttttctgtatcaactcatctcatcctcatcatagacgtataatggaagtcttagtattattcccattttacaaataaggatgttgaggtacagaacctttaattaacttgcatccagtaagtgctgaacctgaattggaacctaaggggtctggttccagagcctgtcccccaacctgataaaggcatcacacagatggtacaactgtttatatcatcaccggtgacagtttcaactctgcaactgaagacttatctgtctgcctcaggctcttatttagcccctgcctggccctaccttgcttgatttcttttttattataagatggaattcagatgacgtgagccttctaaggaattaactttgtggcaggaaggtgctcattcgttcattcacctaaccaacataattggtgtctagctatgcaagacactgcactgtgtgtcaacaaaacaggaaagcggttgtgtgtgatggttcagatgggagacacaacaaccacacagacccaagatccacaccccacatccatattcgttagcttgcaggagttctggtctgaacttctccaagcatctgtttcctcattcttattcctataaaataagatgactaaacttgtccataatttatttttttcctataatttttttttttttttttgagatggagtcttgctctgtcacccaggctggagtgcagtggcgtgatctcggctcactgcaacctccacctccagggttcaaacaattctcctgcctcagcctcccaagtagcttggattacaggcagacaccaccatgccaagctaattttattatttttgtagaaacggggtttcaccatgttgaccaggctggtcttgaactcctaacctcaagtaatttgcccatcttggcctcccaaagtgctggtattataggcgtgagccaccgcgcctggcctttttccataatttactttttgaagagaatgttctaggtggatgtttactgtatacataccttcttaattgattgtcttctgttgagtaggagagtatcgttataattttcaccttcctatccccctgattataaaaataatacaggcccacaatcctgtatccccgacccaggggccagatgcattttgtaagccaaattttttgcgcttttagatgcattttgtttacactaaatgtcaaataatacatgaatacctcttcagagaaatgtatggatagtcacaccacctgagaacattaaagacttcatggaaactcagaagaatccatattttgctggcgaatgaactgtgtggattttggaattataggtaagggattattaatgggacctgcatatgcttgtggtggcaaatttggaaaaatacagtgaagtattaaaaagaaagtaatcacattaaaaagaaataacaattggaattttcatgtatgttttctaattcgttgaattattcaacaatatcattgatcctctattagatgttctagggcagtggttttcaaaggtgaaattttgtcccccgaggggatttagcaatatctggagacattttggttgtcacatctagagccagctgctagtaggtagagttggcatttagtaggtagagttggcatttagtaggtagagttgaggatgctgttaaacatcctacaatgcatagaacagccttcacgacagagaattatccagccccaaatgtcaatagtgccatgattaagaagattaagaaatctcggctagactttagacatacagtaatgaataaaacaattaaaagttaatatatttactatatatttataacatatatatgatgtatgcacacacagaaaaatataagggttttaaaatgtggtattattccatatatagttttttttttttacttaacattgcttcatgaatgttttacgatatcaaaaactcttcaaacacatcatttttatgcctatagaatattgcttcagaaagaaatgaaattatttttagccatttctttacataaaaattgattttgctttctttatttaaaataatgccatgatgaacatccttatatttacattgttttatgacatctctgattatttcattgggttctcaggctgacagctcattctagagtagggttattgagtcaaagggtacaaactttaaaacatccttagtgtatgtgataaaattgctttgcagaaaggttgttccaagttttacttggtgcaggagtttacattaaaaatcagagacttagggtaccaaataaacatagctagggctgggcgttggtggctcacacctgtaatcccagcactttgggaggccaaggtgggtggatcacgaggtcaagatatcaagaccatcctggccaacgtggtgaaaccccgtctgtagtaaaaatacaaaaattagccaggcgtggtggcgtgtgcctgtagtcccagctacttgggaggctgaggcaggagaattgcttgaacctgggaggtggaggttgcaatgagctgagatctcgccactgcactccagcctggtgacagagtgagactccgcctcaacaacaacaacaaaaaaccccaaaaaccccccaaaataaaaaacaaaaacagagctagttcaagctatgaataacacatccagaacattctggtgacaggaagaagccttcagaaacagaatagcctgttggctattctcagctggccatttggtcctggatggactcagtcaggctcatgatactcattgtattgtaatcaccccagcatgcaaacagattggacaacagttcaaagactgggcaacagaacacaattaagaagtgattaacttacgggaaaagatgaaaagagctcaagtatgaaagccatgtggcagaaaaccctgggaggaggtgatcaccatttccaagcattgaaattccataaataaaaggctagaagaggaacttctcgggggatgatttaaaaggtaatggcatatctttgaacaatgaggattccaggctgaaatctcaagaggaagcttccttgttgtggttctcgacaggaataatccgttgaggaaatgatagaattccttttaacgtgtcggtaggtgaaacagcaagaggaacacaggccaatcagataatgtgaatttgtcctccagcaagtgctgcaccggagcttagtgaatgagtaaggttctcccagactcagggcaaagggagcacaggctccactataggcagcagttgatggagaacctcgatttggacggaagaaaattcctggtttctctttttctgaggctgaagaagaacagaagctcatcaaatagaggagggctggctactcctgtagccataaaaagggagacgtagatattttcagctttgcagaccctccaggctctgtgtcaaccgctcacctctgccttcgtagactaaatgcagtcatagacatgggtaaataatgtgtgtggctgtgttttaataaaactttatttgcagaaacaggcagtgcctagggagcatggtttgctgacggctgatctcaagaagcgggaaagacgccctgtaaaagagcgaggaaatttaaagagaatgggttcaagtaccatctctacacttaacggctagttaattaacctttgtgaacacttggggtttttttttgtccatgaaaagggttaattgcagtgcctccctcatgggtttgttctcagaatcaaatggaacaatgtctgaataatgcttatcataggcctgggtgcacagaggtactaaaataagagaaagagtaaaaagaatgcacattttattatagttcttaccctattctattgggtttatgtaactgtttccttcactagtatgagctcctgaagttcaaaaatcccacttagttaacacacgtctccagtacccatcatggtggcacatggtgggtggtgttttgggtttgaaagcagcactggggatgggggttgggggcagtggtttagtgagggaaggctcccatgggagtgggaaccaaggaagcaggacacggtgggagaaggagcgaagcagaggtttttgtgaactggagtctagcttcagcctgatgccttggggatatacattgcgtgtatcgggagcagatactgcaccccagcattagctcatgttgaagcaaaggcgctggcctttcatggcctggaacagtcagttactggctgtaggctggcctcattaagagtgaggagataatctcccaggtgaattggcttctgtgctgctgaatgagagcagctgggagctgttagctctgccaatggggtggggggatgggtgaggggggcatgacagcttctctgcagtgcccaattattgcttgttccataaaagcctatgtgttctgtggttatgctctaaatcacccgtgaaacacagctggtttataggaaacgggagaagggcagagccagggtgactaagtcatcacctgtcactccaaagataaattgtttagctgagaggctgagcccagagatggtgaggaacctgactcaaggatggtgatgttctctctttgcagggacaggaagtggcttcttttttcagtggcctgtgggcgtttcctttgcctggaggagtgtgtggtaccatccagactgagggttgctgaaatccctcaccgggcttgacacaagtgccaataatgccacagtaacatctgcctgggttctggcatctggcgagagtgggattgaatcccagctctgccactttagccatgtgaccttgaaccaatgacttagcaatataagccttattttccatgtctgtaaaatgggaatagcaatacttcccaattcttagggcttttgtgaggcttagagttaatgcttataaaatggctggcacttaattaaactccaatttcaatacacggtaattttatttactttctttgttatgatggtgtatttgttatgtatttatagaaatggtattgttcagttaatgtttcccagttgtcatttgcatattactttggatttttgccatatctgttgccacctgtactattatttatttagcatacattagttgactcttgaaaataaaacttaaatagttttaataggaccagggcaataaggggtttggatgggctagtgcttggcctatgataagtatgctatgaatgggagctactattatcatcaacactgacattaaatgactcttagttttgtatcctatctgggaatttgcattgactcatttcatttcttccttttagaatcaagttgcttgcattctctccattggatgaggtcacgtctttactcctgcctgagctaattgatgtattcttaaagtggcttgcttggctaagaatttcatgcatagtatcaggggattttttctttcctctgttaaataacttgggctctgacagattacaaggaagttattactcagagctaagtgctcaaaactgattgtagggagcagtggaaattccccttccttgcctaaaataactggaactggaacatgacaatatgagctttgtccaggcttgaaacaatatcctttccaagtgaattttgtacggaaatacttaccaatatatagtggtagttctcactgacaggctagaaaaaggttagtcattccccgtattccatagctaaaagggccattgttagggacaataagcccccgaggagtgaaatttaagcatgtggacatagtaatattggacttacctgacttctccctgccccttatcccatttgattccttcactatcaaaagaatctaattccggaaatagacatgctctccatttgtttgattatttttattgcaagtatgtttgtgacaaccttcccctgaacacccccgagcaggtcctgaggaaacgggagaaggaaatgctcaggtccttatagtagatgcgagttcagagtagctgactcagatgaatgtccgtgagttcaaattccacagcagtttttaatcccatgtcttgagctgtttcagaaggttgataattagcaagggcatgtgtccagccctcgcagactcaggatgtaaagatctggagattttgttggagtgagtattccattgctgaactgttatgctcattattacagattaaaaaaataaactgggcaagatcttgtgaagtgcttcactctgttttttttttgttgttgtttttgttaataaaaatttcttattaaaaaaaatttaaggctaagtggaaaaggggggcaggaataaaagtgggaatccgtcaatgagctttttttgttattataagctccaagaaattttgttagtgctggtcatattagctagtgttaagattttctcaaggcctgaaatctactgcatgcaatttattaagctgcagcacccgtgccaggaaacattcccctctaaaggaagaaggaggcggagtgtaagggttattttgatttacctttcctggctgaggtctctgaaatcactctcaacacaacaggcttcctcttttggggagggtctccctctcccaccaaccttgcaggttcaggagggaggccctggggggcaggaatttgctccacccactaagtgaggccagatgattctggcatttagtggagtggcaggtgggacttcagagctcactaaagtctttccttgcttttccctcttccgtgtctctcatcaatgcagaggagtcacatctttaggctcctagaatggatatgactccaactctgccatcccaagcttggcaggggtaatagtaggaatgagagggaaataccaatattagtggggcctgccaattcacacacgtgcaggtcgcaggggaagcttgagctgggagggcgtgtgatgccggctcttcccttaagaagggggcgtccccctgctcctgagcgagtaagcacagtttacaaaggcatatatattttttcttatactgtactatggtaccttgaatgcaagtctactattgcatctatcacagtattcaaagaaatagtcatctctatactccacagtaccccttatgtggatgcctaaagagacttgaaaagaatccttatggcagcatggctggtcatggtgatcacctggatatgcacaaaatggccaacaaggagaatgggttctgggttgggtatgtgttccaagtatagccagagagattcttgcctgggactttcgtgagagctattgggaaaaaggggtgtgtgtgtgtgtgtgtgtgtgtgtgtgtatgtgtgtgtgtgtgtgtgtgtgtgtgtttcttttggtttcttttggagccaccagttgtggggaccatctaggcctgaagctacagatgattgctttgccattcacatggagacagcctacttgaaagtaatggcaatatagaggaaagcagagccaagaaatagagaatgacacattcttgataacgcttctcgccgcctggatccagcatgcctgaagtcagcagtaaacttggatgcttcagttacaagtgctaagttccctttcattcttttttttttttttttgagttggagtctcgctctgttgcccaggctggagtgcagtggcatgatctcggctcactgcaagctccgcctctcaggttcacgccattctcctgcctcagcctcccgagtagctgggactacaggcgtctgccacctcgccgggctaattttttgtatttttagtagagatggggtttcaccatgttagccaggaaggtctcgatctcctgacctcatgatccgcctgcctcagcctcccaaagtgtttagattgcaggcgtgagccaccgcacccggcctcctttcattcttaaacaagatgagttatgtcattgtcatgtgcaacaaaagcagtcttggctatttcatcttcctcctattgatctgaactctaaatgtataggtaaatacttatttggttagagaccaagctttgcaagagagaaaagtcactattccaaggaccaagcgcttaggctcatttgtgctccaggttggacttttattttgagaaattggcctgctttaatcacagataatttgtctaagctattccaattgcgattgaatagtcatttatgccataagttggaatcagccagtgccttcaaatgttgatatctgtgatgagtgcaaacaactttttttttttttttaacaatcagttttcataacaggggtgcacactcagcccctgagtcacccgttggctaacagttctctctcccatttgtgatggccattcacccatctgaatttttgataaatatacactcccaaatatctgtccttaatgagcctctatgttatgctctggcatgtgggatattgccccataatcctgtggccccagtatagacaggtacccatttcctgtggctgcccactgagagagtggtgatttccccatcagaggcatcagcctttgacttgtttttcttgtagatatgatgcttcatgccaagtcatccaccaaacaccatgcaacgagggacagggctgagttgtctagagatgcaaaaagaaaattttgtaagctggttgcataaccatcgctccttgttagcactagtacctaagaggactgtcttcctctttcagctttccagagatctgtgtgccctcaggaagcaagtgcaatagggatctatctccaagaatatggacactaaacaggtacagggcccaggaccacacagaagccgggagagacacaggcgtgtccactcaatgaggcatctggcatttcaagacataaagatgaagagatgccaaaataggggttacccaaatttatgaaatatatttttttctttttttttttgtttttcagagacagggtctcattctatcacccaagctggagtgcagtggttccatcatggctcgctgcagccttgacctcctgggctcaagtgagcttcccacctcagcctcttgagtagctgggaactacaggcatgtgccaccatgcttggctaatttttgttttttaaattttttgtagagacagggtctcattatgttgcccagaccggtcttgaactcctggtctcaagcggtactccaggtttggcctcccaaagtgctaggattataggcataagtcaccactggtctccttggaatatttttcagtgttatattgaacaaaataaaagtttgaatacacacacacacaaattactgttcattgcaatggcattgtgctgtatacaaggctgtagaagttattaaccatattgtcttagaatgaacttgaggtaacatgatctgtggatgggtacataagtataaaattgccctattacgaatgcatccctgtgaattcatgcaatctttttggagatgacattggaaagtcaatatgaggccaaggccaaatgtcccctggctcctcacagccaaccctactagaaggcattaagttaatacaaaattaagattttttttttttttgagatggaatctcactctgtcacccaggctggagtgcagtggcatgatctcggctcactgcaacctgtgcctccgggttcaagcgattctcctgcctcagcctcctgagtagctgggactacaggcacacgctgctgtgcctggctaatttttgtatttttagtagagacggggtttcaccatgttggtcaggctggtctcaaactcctgaccttgtgatccacctgccttgacctcccaaagtgctgggattacaggcatgagccaccatgcccggccaaaaaattaagatttaaaaacatgattaggttgtgtcttgtgcttcctgcctccataggcctggaagagaagggcagtgtggcgtaatggaactaacactaacttgatggggacccaaaggaatgcaatgcttgctcttgtggctttgccccagctagccatgagagcgtgggggaaatcacttaccgtctttggatttccccatctataaagatgttaagtgttggacgatgggcttgcaagtttcttctaaaacttggtgatcacatctgttccatgtggacggtctaggtactagggatacagtggtgtgaaaaatcaccctacgcagatcgttcctgcctacagggaatgaggtagggggatgaagacagagaggtgagaggataagggggtggagtttatgggtatgttgataacaagcaaaaatatgaactctacaatgttagagggagcaaacgcaatgaagagcaatgagcaagggaaggagctagagagtggtcagggaaagcctgtctggccatcagtgcttcccaactgattggctatttttttagaaagacattaataaaggatgtgccatagagcgggtggaggactcagtgggcagaagagccactgaagaatctactagatacagaaaatgatggtcataggtaatggtggtcgttcattatttttgcataccgatatccaattgttcaagtgtcacttgttgaaaagactaccattttcctacggaggaaataatccaagttttaaaaagttccacttagtggtcatttctatgaacaaaatgaatagtgctggataacagatgagacttacatgattcaaaggcagttacgtgaagccctggggaagagctttccaggagaggcaacggcaggtgcacaagccccgaggtaagaaagggaaatgtcaagaccagaaggcaggctgatacggaggaatcttccagaagaagtccaaaggatgaactgagactggacttgaggcaggaccttgtgagcccaggtaaagatttaaattctactctaaggagcaatggataccatgggttttgtgttacataatcaattctaccatatagctgcttcgatgtaacttactggcaagagtgagtgcttggcctgtatttcagaaatttctagagtcctgagaaaccactgggggtgtggctgtgccatctggcaacttcctgagagccccctaatctgggagaatttatgaagatgctcagggatagatgtacttcacatttcggctgttgaacggccctgtatgcaaataggaattgtattagaatgaagaatgagttttgatatatggggtgcatgcgtgtttacaattcttaatcttgatgagtcatgaagagtatttccacatttcaataagtgaacattctggttattgtttacagtatttctctgtccacagcttttgaaacaccttttatttgaaaataaattcaggctgggcacggtggctcacgcctgtaatcccagcactttaggaggctgagatgggtgagtcacttgaggtcaggagtttgagacctggccaacatggagaaactctgtctctacttaaaaaaattgaaaaattagctgggcatggtggcgcatgcctataatcccagctacctgggaggctgaagcatgagaatcgcttgaacccaggaggtggagattgcagtgagctgaggtcacaccactgcactccagcctgggtgacagagcgagactctgtctcaaaaaaaaaaaaaaaaaagttcaaagttacaaatatagaagtagtataaaaatacctatattgcctttatttatctactgatatcttaatatccatctgcatgattgtttatgcagtcctgttaactggaacattctcacagctttttttgtctgttatgatattagcattttcaaagaatacagcttcctcctgtttgatagaatgttctccattttctgtttgtctgatgtgtcttgattcggtgtaggctatgcattctttgctggactgtggggcaaagaggatgttgtatcctcctcaggatatcacatctggaggcaggtggtgtctatctgttcgtcactggtggcattaaatacctccaacgttgaatccaatgtttgtggatgagacaaggtgggggaggggaggaagaaagttgaaaacacaagatgccatgactcaacattagttaagttcttgagtcatctgtgttgctaaattaaccaccaatgcaaagcacatgtaggcacgcacacaagcacacacgcacatgttacaacacacacacacacacacacacacacacacacacacacagctcagttctatgttgcatttttaaagctatcactggccgggcacggtggctcacgcctgtaatcccagcactttgggaggccgaagtgggcggatcacctgaggtcaggagtttgagatcagcctggccaatatggtgaaaccctgtctctactaaaaatacaaaattgccagatgcggtggtgcacgcctgtaatcccagctattcgggaagctgaggctggagaatagcttgaacctgggaggtggaggttgcagtgagccgagatcgggccactgcactccagaccaggcaacagagcgagactcggtctcattaaaaaaaaaaaaaaaaagctatcaccaaagtcccgttttagcattgaggacattggaagaaataatttcgggagattttcaaattctgcattaagacttcacatataattagtacttcctaataattccttgggtcttacaggatttggtgctatggctaagaggtctgtgggcaccagccaagcaaatgcattagcttagagcagtcgtttttagccctggcagttcattaaattctcttgggtggatttaacacccagtgctgtgcagacctcaccccagatcaactgaatcagaactgaacgtgggccacagatgggagagtttagaagctctgcaagaacttctgatgtcctgccgaggtacagaaccatcagctgaaaagtgtgattctgaagcttcagtgatccccaaatattccttgccctctggtcaggtgctccctttaatagctaacatagattgagtacttacatgtgtaccaggccacatgttgtgggcatccatagatttttgtattcacacatttatttcccttctttgtgtaaaatctccctaattttcctttggctaactaccacacccactttcagctcgtggtttttagggtgctgactgtgcactctgacttcaaggatgaacattgattcccagcttggcaaactgattggttcataaatgatctaagtggtcaagtgagacttgagcccaggactttcactgaaattattgggcaagaggctggacgtagcagctcacacctgggatcccagcactttgggaggcaaaggcgggcagatcacttgagttcgagaccagcctaggcaacataacaaaaccgtttccctgcaaaaaaaaaaaaaaccaaaaaacaaaaaacaaaacacaaaaattggccaggcgcagtggctcactcctgtaatcccagcactttgggaggctgaggtgggcggatctcctgaggtcaggagtttgagaccagcctggccaacatggcgaaaccccgtctctactaaaaatagaaaaattagctgggcctagtggtgggcgcctgtaatcccagctacttggaaggctgagacaggagaatcgcttgaacccgggaggcggagattgcattgaaccgagatcatgccactgcactccagcctgggcgacagagcgagactctgcctcaaaaacaaacaaacaaaaaaccacaaaaaatatgctgggcatggtggcgtgcacctgtagttccagctacttggttggctgaggattgttggagctcaggaggtctaggttgcagtaagccgtgatcatgccactgcactccagcctgagcaagagaaaaaaaaagaaagaaagaaagaaagaaagaaaaaaataaattattggccaacagatgtttttatcttctcttggacttaacatggagaaaagggaaccatgaagtaatcagagtttactacagagaggggccaagccaagaatgaaaccaacatagaagaaagcagaaagaaagaaaaaaaagaacagggtggatacggtttgagccccctggatttagccacgcctgaagctatcaactcctggatcattaagttatatgagtcaataaattcctattttgcttaagtcagtttgagttgaggtttctgctattgcaactgaaaggctcctggttaaaacacatttaaaacttttaaaaattttacagaagtccaggaagtagttattgttagtatccttgttttatagatgctttatagacactgaggcttagggagttaacagcttcagatgattcctgtgtatacttaaatatgagaatcactgataaaggtacttgatctagctgcttcttaagggtgataacactttttttctcttctttccttttctttctttcttttttttttgagatggagtcttgctccgtcgcccaggctggaatgcagtggtgtgatcttggctcactgcaacctccgcctcctaggttcaagtgatcctcctgcctcagccacctgagtagttgggattacaggttactcaggtggctgccaccatgcccagctgatttttgtatttttagtagatgcagggttttgccatgttgaccaggatggtctcgaactcctgacctcaagttatctgcccagcttggcctcccaaagtgctgggattacaggcgtgagccactatgccctgcctctcttctttcttcttttcttttctttcttttttttttttttgagacggagtctcgctcttgtcacccaggctggagtgcagtggtacgatctcagctcactgcaacctccacctcctgggttcaagcaattctcctgcctcagcctcctgagcagctggtattacaggcgcccgccaccatgcctggctaatttttgatgttttggtagagatggggtttcaccatgttggccaggcctgtcttgaactcctcacctcaagtgatccacccaccttggcctcccaaagtgctggggttacaggcgtgcgccaccatgcccggcctctttttgcttttaaaaataagtctggagtctaacatagtctaagcaaagaaggtttaaaatccccacccagacctaactgactagggccatggagcatggggtgaaatcatgaggtgcttgggttggaaccgtgtggattgcagcgtggctgcagtggtgcctgccacttcctaggtgtgtggccatgagcacactgtgaagaccctctgccacagggcttccaggagcaccgcctgcagcgggcttcccacaccttcactgagatgaaccatcgaaagccctgccttggcactcaaacctccaatttcaagattgggaaagacaagtgtatttctgcatgttgaattttctttctttttgtttcctcttttggtggctttatgaggaagatggaggtggcaattgccaagtggagaataagaagaagtggaaaaaaatgaaaataagaaagataataggtggaagagagtcaggcagagtgaaggaatcaaagagcggcacaggaccctgagatccgcctagcatccattaacaagtattcacggagcaccgatgtgtcaggaactgtcctccgccctgggaccatgctgggacatggaccgagaatagtcacatgtctgtggagctagtgagggagagagatgccaaataattatggaaaaggtatatctgccaagtagaggtaagtgccggggagaaaaataaaacagggagagtaatggatgcgtgggggatgggagggcacagccttgtaaggggtggggagtgagccaccagaaaggagggtatattagtccgttttcacgctgctgataaaaacatacccgagactgggaagcaaaaaaggtttaattggacttacagttccacgtggctggggaggcctcagaatcatggcagggggcaaaaggcacttcctacatggtggcggcaagagaaaaatgacgaggaagcaaaagcagagacccctgataaaagtatcagatctcatgagacttattcactatcacaagaatagcaagggaaagaccggctctcatgattcaattacctccccctgggtccccccacaacacatgggaattctggaagatacaattcaagttgagatttggtggggacacagccaaatcgtatcagagggaaaagccacaaggtgggaacatgcttggccagaagctattgtggctggggtgaagaaaacaaggacggagaggagtgacagaggccatcaggccagggcgtgagtgaggatcccagaaagatagagatatgtcagcgggtacaagtctgggggcactggagcgatgcaggccttcacaaattccgaagtggtagtggcccttgcaggtggcctttgtagggagggccttcaactccagcacacatccctgccctgggctagccatccttgcttcagctttgaccagggtccatatcagcaagatcattgtgaccctgttaaagaatccaggttttgttggaaggatcatggggagtcccaagcagcatgagacaatgcgctttacattttaaaaatgacactgatgcttctcggagaacagattgcagggatgagggcaagtgggcagcagagaatgtgaccagtcatctggatttaccagagatggaggggtttcctgggacatgggacttccagggacaaaaccaggcactggaatgagctgatgaccagaaagcagagagaccagagaggaggctatagtagtctttgaccaagaggtgtgagtagcttagattagggtaagagcagggctgtgatgacaagcggttggatttgagaggtattttgaaggagtggtaagaggagctattgctttaagaagcaggcaaggcaaatctcagctccaggtggcaggaaagcctttcagaaggagagctctcaccctgggcctgcaggccagttggctgtgggacatcaagtcattcatctccccaggttccagctctttcctcggttggggagggtgtgggggtaatgatgccaacctcgcagtgttgccacaggattcagtcacacatcctgggatgcccctttgcagcaggtgctggctgatattatttcttaggagcctgcacaaaaatttaagaaggcatttaggaagttggtggagcaggagatatggatgtttataaaatgagagctgtctctcctttggccagtgctggatcctctctgctgtttgtatctacatgtgagagggaggtttggggatcttatgtgcaagactgctttctgtgctctctgtctcttatctcctgtccccagctgaggtaggagccgtcactccatcatccttgcccccgtcgaatggtgcttgtcttctgccccagcccttgccctcctggcctgctgtgtagttagttcctggcatggaatggaatctaagaatgaaagacaggtcgagcccttacagtttgcaaggccatctgagaggtcttcgtgtaccttgatgatgacggggtcctctccacagccccaagtgaagttcaaaggaaaaagataataacgcggccgggcgcagtggctcatgcccgtaatcccagcactttgggaggccgaggcgggcggatcacaaggtcaggagatcaagaccatcctggctaacatggtgaaaccccgtctctactaaaaatacaaaaattagccagtcgtggtggtgggcgcctgtagtcccagctacttgagaggctgaggcaggaggatggcatgaacctgggagacagagcttgcagtgagctgagatcgcgccactgcacaccagcctgggcgacagagcgagactctgtctcaaaaaaaaaaaaaaatatatatacacacacacacacacacacacacacacatattcatatatatacgtatatatgtatacatgtatatacgtatatatgtatatatacatatatgtatatatatccatgtgtgtgtatatatatccatgtgtatatatgtatacgtatatatacacgtatatatgtacgtatacatgtatatatatacacatatacagatacatgtatatatacatatatataaaataaagcataagatataattatatttttggaaatgacacataactctatgtattatgatggttttcttttgaggtttcctctttggttcttgaggagtcaaatcccttctttgctatgccgtagttgcatgttgagaggtcctgtgccaggtgctcaggtgcctgtcatttcatcagctacacaccctggaagcaggcctgactcaatggtccctgctttccccatgaagcagcagtgactcagagagatgacacatttgcccacggtcattcagtttctcagctaaatgaagcttcatttagcttcatttctccttctcttaatctccaggtatctatttatctatccatccatccatccatcttcctatccatctattctctattgatgtatgtatatatatatatgtattatgtatctatgtgtctattacctgtttatgtttctattacttatctatatctacccatttatatgtatgtatgtatctatctaccatctatctatccatcctctacctattttccatctatctatcatctatgtatgtattatgtacctatgtgtctgtcatctatgtatctattacctatctatctttttaaaaatttatttaatagagacggggtcccgttatgttgcccaggctggtcttgaactctggactcaagtgatcctcctgcctcggccccccaaagtgctgggattacaggcatgagccaccatgcctggctgtacctatctatctttatctactcatctatatatattgtatgtatctatcatctatctatctatctatctatctatctatctatctatctatctatcatctatcaatcatctatgtgtcttatctatcatctatcttatctatgtatctctatgacctgtctatctatgtatctatctgttatctctctggttatctggtctccagtgcccacctcctcctcccagtcttttctctcaccctgactctgaacttctccaggcctggtgttatgttttctgtagcgtgaccttataactaaccatcccatcgaagacgcttgggggagtgaaaggaggggctattaatacttctgcaaaaactggcgctgccctgagcacactgggatgcctggtggtggtggtggttaggtgtagatttctccccattccttagtgcctcacaagggtgctgtaaaacgtttgtcgagtgtgttttatcaacagtctcagaaggggtggtaaaaaaaaatactcgtttgtttcatacagagagaaattgcattacaaagtgatgacttacaaaatcaccgaaaggaaatcaatggtgaggtggagccaaacctctgctgtagaatttctggattcagataacacagagctctctccatcaagcatttgtgtgcagaagctaagctccaggcccagggagagagcttgaagcaaagacataataaaacagtaacagctgctaccgaagctgtgtcatgcaactttgcttagccctttactgtatggtctcatttattccttaaggaaggtgagattataatagaaaaggaaaatgaatgtgccgcagtcacacaaatcactcactactacactgccaccagagcccaacagagtagccacaattgttttcttcctaaaaggtgcaatggagtaatactgcacaatttccatttagatgtcccttcaacacgtttcctgggaatcttagagcagttaacacccatttagaaaggagctttttcatttcgtaaatatgttcagtgcaccaaaacaggcaaacaagataacccgaactcttaacttgcctcagcacctcaccccttaagatacatagaaacaaatcagaaattatgctcaataaggaatttgcaaggctgaggagggggagctggagtcaaatcagctgggtcttccgcccccttcagtaggagggggaagattactgcagagaatgtaacaaggagaataagagagagggagggagggggaagagagagagagagggaggggggtggagaaagagagagacagagaaggaaaggaagaaagaaaaagagagagaataactgttggtaacggacagcccaagaaaattgtagaaaagtccatctctggtacctacctggtgccaccttccccccacccccgcgttgtttatttatttatttattttttctagccaccaccattttgttgcctggcagaggtgtgagatgcaaggctgtttacaaagcccccagcaagagcaatcccatcatcaggaggtttgcttcccccccgggccagccctctcgctctccatgcccgtcttggctgcatgcgttgtacctaacacatttaacccgcgtttcttaagagttctgcaaaatggtgtctgctggtgtttgcaagggaagctcccgctgggcgtcccgagctgggtgggagctgagtgtgcggttccctaacgagctggcggccggcctgagcggctctgatctccaattctgacggcttgtccttcaggtgacctatattatctggcacctcagttgctgctcacaaagaaaaagtatcactggaagaaagaaaaaaaaaatcccaagtgattgtgtacatgctctttattgagaatattaaactcagacgccctctgctgggcaagacgggaaggggaggctgggagtaggggagggtggccgggagggctcaggagaagccggggacggcctccttcctgtgagatctgtgggcatgattcagggcaaagggcgcccatcagagctgctttaggcaaagggaaatacaaaacaaaagtgaaaccgctgacaaggaaatcatttaattggggagaaatgacaacttcttcacttggatttttttttttcctgttcctaaaattgttgcttttgataggtgagagggaatggggtgggggagactgctggacactgccaacttattcatcaagacaaagggtttgggtttcagggaagtcctagcaaagagtgtggctcagcgggtagaagggtagctgaaataccaggacatttttgagagtgaaacagagtgctatggatgatgatgcggacacagcaggtatagtccagagtgtcccaggcaaatctgactacctagtccagcactgcacagagagctttctaggatgatatgaatgttttgcatctgtcctgtcctatctatctatctatttatttatttatttttgagacagagcctttctctgttgcccaggctggagtgcagtggcacgatctcggctcacggcaacctccaactcttaagttcaagcgattctcgtaccccaacctcccgagtagctgggattacaggcacccgccaccatggctggctaatttttgtatttttagtagagacagggtttcgccgtgttggccaggatggtctcaaactcctgacctcaggtgatccacctgcctcagcctcccaaagtgccgggattacaggcgcgagccactgcgcccggactgtcctgtcctatatggtaaccaccacccacatgtggctactgggctcttgaaatgcagctacgcaactgtgaggggatgaattcttaacttcatttaatttttgttattctgaatttacatttaaatagtcacgtatgtctagtggctatcagacggtagagctctggtcttactattcacaggaacacaccgtgacccccattgacagcagctaagaccccaggaacaggcttgttgcgagaggccctccaaacaatttattgaatgaataaaaactcagtaatcaaaagtcacagagatagaaattcacaacacttcttggagacttataggagcttccagaaacacaacttctcccagggagagtcaagagagcagtgtcatttcctataaaatgtccaaggccaatcccaggtcccggtgtcagcccttgcgtgtggcactggcaccagcagccagaaaggttacttgtgacttgttttcagtgctttcctgggagtgtcctgaaagctggcagtgtttctgcctcgtcagaagaggcctcattcatttggggttgtaccagcaacttaaaaagtttttttttttcttccctcttccagtgttaatagattttgaaagaggcatttttgtttctaattacaaattcctgggtgatgtcattaagccctcaaacacccggtgagggcggcactgaatggggaaagacaatatgctaacaagttatctgagggtgtcagaaagaaatgatgaaaaacagtacagttgggggaaatgttttccagcctgctttctggttttagcgactgcatgggaagagataagacacacatggcttttataaggagccatcgggatctctaggggacatgaggcaggagaaaagaattgggctgaaagcatccaatcatcacatattcacggagaaagagattacaatatagcagaggaagctcttccagggctcctacagggacctttgggacaaagattcagtgggctttgggacagcttgacttcaactagatggtatttgaataatctgctggagagaaaacagatatagcacacactgtcacatttagcgttgaaactctcggtttgactatgagtaatgttcagccatgcccaagggtcaggcctacactcactcagaaacaagtggggaattgaagcaattattcagataatccatagacatagctactggccagtgctgcacccctgatttagcccagaaacagtaatgctattataagctgttggtgatttgtggagcaatcttgaatttattaaggaaaggagattatagaaaaatccagaatgccaatgggatgcattcaggttgagtcatgcagagtaaggtgggaaatggagggcctcccacccctgcaaggaacatcttgctttaggccaaaatggaaataaaactttgggttgaaattttgcagatggtttgtttctccatatcactgtttttacatgtgtagttgataaatttcatgttggattgtatgtggatcaaaaggcagaaaatggtaaaatggcatattaagaattttgagataatatgaataaaatattatttacagctgtttcttaattagtaccttcccatgattttgagtggactagccagtgggaaaaatgtgttcattttcttcagttgttcaaaactactttgaacagaatatagtttacctgcctataatggaaaacccagataccagcagcttaggcaagatttatgtttctcatttactgcataatctagaggtagatagctagaggcagaggtataatccagaggtacctacctagagctgggtagctgcctacctctactctaccccgtctctactaaaaatacaaaaattagccaggcatgtgcctgtaatctcagctactctggagtctgaggtgggagaatcgcttgaacccctggaggcggaggttgcagtgagccgagatcgcgccactgcactccagcctgggcgacagagcgagactccgtctcaaaaaaaaaaaaaaagaaaaaaaaagaaaaaagaaagaaagaaagaagggcgactcaattagacccaattggggtaagcatcacgtagactttaccatttcaaagaatctttaaaacacggaaagtagtagttgatgtggtgtggattttaaggccagattttttgacccttctttgatcgtcacctagtcttccaggtagcagatggtcacatcgtcttccagggagaagggcaggaggaatcactgatgtctgcactcctacgtgcaaccccacctccacctttaaggagcttttggggaagcctcaatcaatgattctgacatctcattggccagaggtctgttaaatggccacccctagttgcaaaggaggctgggaaatgtagttttaatcccccgcgacccctccccttcgccctcacacaccaagttgaaatcacgttattaatactaagaagggagactcagctgggcgccgtggctcactcctgtaatcccagcattttgggaggccgaggcaggcgggtcacctgaggtcaggagttcaagaccagcctggccaacatggtgaaaccccatctctactataactacaaaaattagctgggcatgtgcctgtaatctcagctactcaggaggctgagggaggggaagaatcgcttgaacccgggaggcggaggttgcagtgagccaagaccacaccactgcactccagtctgggcaacagagtgagactctgtctctaaataaataaataaagaagggagacccaattaggggtaagcgtcataagtctaaagtaaagtagactttaccatttcaaagaatctttaaagcatggaaatttgtatctagttttacaaaaatcatcctaactcagtagtttataggagcaacttttatttgtaactaccatggagcaaaataatcattatgtataataattatatatgtcgaggagacagttaaggggtgtgtgtgtgtgtgctctaagaatgtaaacctcattcttactggctgagcttaactgcactgctccttgggattttaaataaattagctgtgtctttgtccgtcagcaactcagtctccctctattagcatctgtgctgagtagtgcactcctgagaactaaatgaagagcttcagtagtagtttcgtaaacctgaaatgcagtgtctagagcaagttcaacttcattagcgatttgaagagagatttatcgagccaaagggaagacctctctgaacggagtttgtctgccttgatttaagtaacgaaaacaaccatggcatttgagtggtggttaggttcaggtctgaaacaatttctttgtgagtcaactgttattagcggtggaagaaaggatggggatgaagggaagggccgggagtagagactatggcggggcataggggctgatcacacagggtcttgcgggcacattaacagactgaattttggcctttggttcggtggttggaaactcttttagggccaggcagtaacatccgtgcatgaggctggccagggtacagaaatagagaaaggagaaaaactgcagggctgtaaagcatgtgactccccaaagcaatggtcactacctggctctagaggactgattccatgggagactaaagacctaccgctacaagccagttagatttttttttttttttttttttttttgagacggagtctcgatcttgtcactcaggctggagtgcagtggcgcaatcttatatcactgcaacctctgccgcccaggttcaagcgattctcctgcctcagcctcctgagtagctgggattacaggtgcctgccaccatgcctggctaatttttgtatttttagtagaggcagggtttcaccatattggccaggctggtctcgaactcctgaccttgtgatccgcccgcctcagcctcccaaagtactgggattacaggtgtgagccatcgcggctagggcaagttagatttatcaggaaaagcccagtatctaaatacttgtatgaaatctgacgtcataatgttggatcaaattttataatgggtcaagtgctgaacaaaggtggccacagttagcaactgtttgatgggcaacatggcgttagcaaggcactctgagcagggaagacacggatgctttccctttctcctcctcctctctgcctccacctcttccttctcccctccctgcctcctctgacatgaggttctctccagcggccgtggcaaggatgcttttgaatggagtggagggtagcacaaggcaggtagggtaggcattgcctaatggcaggaaagccagttaggatgttctggtcacagtcaggatttgatttgttgagagttggaattaaggcaatgacaggacagaacgatgggctgaattctggaatgatttctcagtcactcacgggagtggtgtctgactggataaggcacaggtgggtgttaggaaagggagaatttgaggaagagagtgattttgtttgaggtcgaagtcaccatctgggatcttggcagctgaacctactccacaggggtgttttgttgaacacaagggattaaaatttcttttgaattgattttcatttcttaagaaaatgcgagcacttatatttaaagctagatttccacctccttttggagaaaaagaaatctgagagtattaggcatagattccaataaagcaacaacagctggagctggggggtggggtcggggcttgggtattgggggaggtacacggattccctagtatttctttgccccacctgccttcggtaagtatttgagtctgtgacccctgagggaaccggttgtgcaagtcataggaatatacgagatcattcaggcacaacaaggagaattccaggcaacaatcacatttcaggacagatagaaaaggagaagattgcaaaagggatttagaagcttgggctgggagagcgggcaagcaacaggaaggcaaagtggaataaaagatagaagtggggaacctgctgtacgaggctactgaagagccgagtagcatggggttgaaatgggttgttgatgtaaatgtgccgcgttgtggtggtggtggagaggttgtcggagcctattaatgttaaaaggaaaagtgcgcactcaatcagcctgcaggtgcaattctttacctgccctagagaaatgaaattctcatgggtgcacagggagaagtggtaaagggtgccctttgttgtattattatttgtttcagtgaagaactagaaacaacctaaacgtgcatcaggagttcaagaccagcccggccaagagaccagcctcgccaacatggtgaaaccccatctctactaaacatacaaaaattagccgggcgtggtggcgggcacctgtaatcccagctactcaggaggctgaggcaggagaattgcttggaccccagaggcagaggttgcagtgaaccgagatcgtgccactgcactccagactgggtgacagagcaagactccatctcaaaaaacaaacaaacaaaaccaaaaagaaacgccccctcacacaaaaaagtggagttataggaaaatatagcgttatagatggcctgtgctgcggcttcctctccctctcctcctccctcctcttccccctctcatttccacccccacttctttagaaacaggatctgaagaaaacgcatcacatatacaacactagatacccttgatgttcctgagattgggaataagtggttaaaagtgaatttaggccaggggcagtggctcatgcctgtaatctcagcactttgggaggccgaggtaggaggatcacttgacgtcaggagtttgagaccagcctgaccaatatggtaaaaccccatctctactaaaaatacaaaaattagccaggcatggtggcacatgcctgtagtcccagctacttgggaggccaagacaggagaatcacttgaacccgggaggtggaggttgcagtgagccaagattgtgccactgcactccagtctgggcgacagagcgtgactccatctcagaaaaaataaaaaaataaaaaaaaaatgaatttaatgtttacctttatctttaaattgttgattatcattttaactaagaaagtgctgttgtgtatcacttgtgcaattagaaattaaagcatagcacaatggatttcgtgttttgcaagggctgtttcagcagttatgggagtggaaaatagattacaacattctgagaagtaaatgggaggtaaagaggcagaaattgaaattaaggggaagtgaaacatagggctacaggatgggggaagacagtcaagggaaacttctgtgttggtttgcttttaactggagtgacccaaaagctcactaaaagggcatgttggcttctcctcagagggcgttgctgctacggtacagcaatggaatttgtttctgagctgagatcactcccgtaatttacatcccaactcttctgatacagaaaagcctagaaggaagttggtgtgaaataaaaatagtttgattggtagaatcaaattataatctctgtataaaggctaaacatttgcatgggggaaatgttgcttgaaataggatacaaaggaatgtccaccaatagagaaattattaaatgttataataacctgtagggtagactattaggtagttattaaaaatcatgtttttcaagttttagaaaaattttaaaacatgggaaaatgctggtaatacaatgtttaattttaaaagtgcatgctatgaaactttatgcagttgagtgcttacaaaatagtatttctgcataaagaaaaaaagaaggaaaagtggttaaaatgttaacagtggttctctctgggtgatgaggaaattggtgattttatttttcatgcatttctgttgacacaacaattttccgtcaaaaacatcattgcttttataattccccaaaggaactgtttttaaaactgtagtttgaaaatcatttaggagggaagacagccaaggaagggttcctgtttgacaagcaatcaggcaagcaggccgtaagcagcctgggcttggattttggagttttttttctcccaccttttccccagatatcaaatgtcaggcctccacaccattaaaaggacctagaaccatcaacttctccaagactgggtaacaaaagtcaactctttcctgctcctaactcaagggggtgttgtgtgttcttaactttataagagaaacacagaactctagggagctatagacacaagctagcaacaaagatgtggcccctgtctcctcaggctgacctgaacaagttgtgtgattcgctgagagaaggactctgcccgcctccctcatactgaccccgctgctttccccaacatggcaggaggcgatgcagcctcgtgattaagtctgcaaactgggaatcacacactcccatttggaatctttgcttttttgcttaacagctctgtggcttctggcaaattctgtaacttctttacacctcagttttctcatgtgtagaaaggagatgaagaaccccacctcactgggttcctctgaagattaaatggaataactccatagaggagaacatgcaacagttactgaatcaatgatttcattctcaggttctctaattttattttcttttcatcctgccttatggccataattcaggtgataaaataagaaaggacatggctggctgtggtggctcttgcctgtaatcccagaactttaggaggccaagatgagaagattccttgaggccaggagttcaagaccagcctgagcaacatagctcaaaacattctctacaaaaaaatgaaaagattgctgggcatggtggcatgtgcctgtagtctcaattacttagcagtctgaggcagaaggatctcttgagctcaggagtttgaggctgcagtgagccatgactacgccactgcacaccagcctgggtgacagaccaaggccctgtctcttaaaataaataaataaataaataataaaaaaaaggataaagaaaagagagtttgaggagaaagattctctctctctctctttttttttttttttgagatggagtctctctctgttgcccaggctggagtggcagtggcatgacctcagcccacctcaacctctgcctcccgggttcaagcaattctgcctcagcctcccgagtagctgggattacaggtgcctgccaccacgcctggctaatttttgtatttttagtagacagagcgtttcgccatgttggccaggctggtcttgaacttctgacctcaggtgatccactcgcctcggcctcccaaagtgctgggattacaggcgtgagccaccatgcccaacccactgtggctttctaaagccagacttagagttaaccagatctgctgagatctttccttacttacacctactaaaggtgaatttattgttcttttgttaatgaatacatcaaaatactcgtatcttttattaatctcagataaaagatcactagagtattggaggaatcgtttctaatacaactttttcagaagaggggaaagcagcttttcaaaatgaaaatgaggtcactatttcgttcacgtgactgtcatcttgtgaagttcattttattacaacctgatcttataaaaagaatctcattttggtttaacttttttaggctacctaacagataacttaaaagtttagctgagagtatttatttccaaattccacagttgtcttaagaaattttagaaaaaaaggcaaaacactgtgtacaaaacagttcaatgtggtgttatctaaaatagtgtggtttgtagtaattccacgtataatagtacagcaaaagaaaaatgacttattcaaggcttgttacactgacaccatgagatatcttgtagccataaaattgtaatcgtgttgtttatgaggaaaaagaaaccaaagcgaaatatatctgatataattttacatacacaaagcataaaacaaaatagtttgcactgaactggggagtcagccagcgagcatttaattgagtgcctactatatgccagctactttcataagtatgaaatggtcaatgtaaaaaatatttgcaaggactgtgtaaaattaagattgtgccggggaatgggattatcatggttgtttttccgttctctcctctaacgtttaaaaatacgttgtggtttcataataaagaaaaatacatgtctgaaacagcgtcataataaacgttgcagatgctgattttgtgctaacttgatgccaggcactgctctgagcagtgtgtgtctgtatctgatttacttccatgatgatggtattatcaccatagaacaacgccattattaccataatagcaccacgcccattttatagtgaagaaactgagacaggatgttctagctcagtgtcttagcttgaacaagctctcccacttagctcagtgggaatccatgttcttaaccaagacttccagcatatcacacaggggtctgcaatacagttatgcatgtggcagctcctatagtattttctcgacatttggcctttggagtggctccctcccattatactggggtgttctgtgtttttctgatttatcactcccctaaatctttactcataggcaatactcaatcaggcattgaataaatcaatcaattcccctctcataaaagaggccagggataatgttgttcactttcttttcttttagaagtgtctgtcagctccctgagattttcatagaatttttttttcctacatgccccaccactgccagtttcaacagacaaggctaactcagttcactagacaagcaaacacttcaactgagaaggcagtgataaacacaggaagttatttcaccctgggaatattccggaaaccaactttgaataattgcttcatgttcagttggacacaagttcactcccaggttgactcacgtatgtaaatgctcctgactaccatctgactgcatcacacacacacccctacctttccaaaatgctaactacacagcatgaatcagccgctcctgattcagagccccgagtccttcatcatcaacctgggctcctgcctttgtctcctaccctcatccagtccaacagcaaaccccacccgccccatcttctaaataaatccagaatctgatcactcctcaccatcctgcagcagcacctcagtcaaattccagtcatcactgagctgcgtgacagcaacagcctccaaactcctctccccgtttcttccattggaaggcttggagctgatctgacttaaattttaaaagactcattctggccgctgtgtggagggtgcactggaagctcacctctttctctggaccaatttctatctgctttttcccttcacatctaaaataggtgctccccggggatttggctcctgatcttatacatacatgtatatatatatatggggcgtgtgtatatatatacacacacacacacacgcacacacacatatttgaaatggagtctcactctgtcacctaggctggagtgcagtggcgtaatctcggttcactgtaacctctgcctcccgggttcaagtgattctcctgcctcagcctcccgagtagctaggactataggcaggcaccaccacgcctggctaatttttgtatttttagtagagatggggttttgccatgttggccaggctggtcttgaatacctgggattacaggagtgagccactgtgcccggccgctgatccaatattttacaaagtttgtgaagaggatgactaattcgtggaatcacaggttttaataagttcaggggcactgggctcagcaacttgcaactggttatttactgcagggattctcagaacctttagtatcctcacgtgtcctggggatcctcaagagaaagacaacagtgggtgttttcaaaccatgatgttgtctcagattcctccagggcttgctccctttgtccttcaggttcatgctccatgtcacctcctcagagaagctgtcgctggctatccataacatcccgtcctctttccctgacttagtattttgggatgtgtggcatttatcaacattaataaaacgatatctcttttttcctatttattactattatttttgcttatgtaacctcttgaattatctttgctgattagtttctgctacttagagtcagtaacccagaatctattaatataaccttcaggagtgtgcatgacgaagttatattctgtcctgcttagtcttcagtggtcacacgttttttgttttttgttagacaaaacaaaacaaaaacccaaaaacgtgtgaccactgaaggtcaaacgtgtgaccctgctctgttgcccaggctggagtgcagtgatgccatctcagctccctgcaacctccgcctcccagtctcaagcaatcctcccatctcagcctcctgagtagctgggactaagggcacacaccactacacccagctaatttttttgtatctttttttttttttgaaggagtttttggtcttgttgcccaggctggaagcaatggcgggatctcggctcactgcaacttttgcctcccggtttcaagcaattctcctgcctcaacctcctgagtagctgggattacaggcatgcaccaccaagcctggctagttttgttttttgttttttgttttttttttgagacggagtctccctctttcgcccaggccagactgcagtggcgcgatctcggctcactgcaagctccgcctcctgggttcacgccattctcctgcctcagcctccagagtagctgggactgcaggcgcccggctaattttttgtatttttagtagagacagggtttcaccatgttagccaggacggactcgatctcctgacctcgtgatctgcccgcctcggcctcccaaagtgctgggattacaggtgtgagccaccgtgctctgcctagttttgtatttttaatagagacggggtttctccatgttggtcaggctggtctcgaactcccaacctcaggttatccgcccgcctcagcctttcaaagtagtgggattacaggcgtgagccaccgcacctggccttttttttttgtatctttagtagagatggggttttgccatgttgcccaggctggtttcaaactcctgagctcaagcaatctgcctgccttggtctcccaaaggatgggattacaggcatgagccgcccgtgcccggcctttgtttttcctatttattatctgactttccccgctagactgtaagatccaggagagcaagagctttgtcagcctcgctctctgtgcagctagactgtaagatccaggagagcaagaactttgtcagcctcgctctctgtgcatcttcagtttctacaacagcacgtaacatgcagtaggtgctctcattaaatcttgttgaatggacacaggtgtattgattttctatcattatgtagcaaatcactgcagagttagtcacttaaaacaatacccatttactgtctaacagtttgagactctgggtataagttagatgggtccttcgctttgagtctcactcggctgaaatcaacatgttggtcagggttgtcatctcatttgaggcctgggtcctcttctgagcccactagtttttgacagaattcagttcctgggcagttgtaggactgagggactcagctcctggagctcctagttggccgctgtgttgttctctccacagcatggcagtttgtcttgtgtcccatacaaagccatgggacaacgtctgctgctgcttccctagttccttttaagggatcacctgattaaaccaggcctacccaggataaacttcctcttgatcaaatcagagtcaactgactggggaccttagatacaacattcttttacctttgtcatgtaacttaatcatagtagtgaaagctcatcaattcaaaggtccagccaatgttccaggtaaggggattatggatgccatgtacaccaggtcaaggaggggacaatcttggggaccactttagaattctgcctagcacaatgtgaagctttatatcccttagaataccttataggattggtggtcctctgggaaatgctttgagaaaggtgctttctcttccccaattcatcaacctcatttcttaaactagagagcatatctgcagacagctctgggggctgagcaggtaagaagagttctgtggggattgtgtaaaagtgagactaagccccagcaaaggggaagggtcatttggtgtcctatattttgtccgtgatcccccaacttccaatatttcaagagaacatggaaatctgaatttgcatatgcatttttctggtgtttaaatcttggaaacaaattcaagttttagcagaatgcgttgccctttcccgaagaaacatgactgtaggctgtactggggaggttgcgttgaaaattgttgctgaaatgatcactgtcttttgaaggctactgcacccatatctttgactggaaactcttctctgaagtgtcatttacatttctacttgcttgcatggtggaaatgtttcttgagctcagaacagaaagtccactaacagtttcatcatatttttactccctcctcatagtcacacgtccttcctggtggggttaagggttttcacatacacctgttcaaccaacctcagacctcagtgatgtttatgacttgttctgtctctgtcactttcctaacatccaactatcatggggtgaaaaaaatcgctcttagaaaagctgcttgaagccctctctctcctggcaggagggcaggaggatgtatttatggagaaagtttgctttttccttggaaaatcatgctaatagaacttgaattacagaatttaaagcctgtcagggaggaaagtgacaaattaacctacttggaagagaaatggaaaagcaggtcttatgaatgatcagattctgtcacttccctgcccaaaatgctctagcatcttcctatcaagttcaggctaaaatccaggtcttaccatcatggttacaaggtctttctggtttctgacagcctgtccaacattatccaagggcacacgagctcttttcaatgtgtcaaatgtgcattcaccttagggcttgtacagtacctcttccttttgtctggaatgcttttcttcctcatatttgcatgattcactccccagtctatgaaactctgtggtcaaatgtcatcttaaaagagcctttccctgatcaacccaactaaattcacatgcccttttctcggtattactccactttttcatttactaatagcatattccagtttttgacatcttatcactagttgtttgtttattgcctgtttcctgtaccaaaatataagctccttgaagggaagaactttgttttgttcacttctttattctaagaaattagaacagtgccttatccacagcatagattctcagtaaatatttattcaatgaatgaacgaatgcaaggatggatgaacaaatgaatggtaggtctgttaatctatcaataagaggtgttgcatctctgcaaagagatgttttgttgtacatttattttcttttcataactgtctttattatctccttgtttctaatttttctaggtttgattgcttttatttttctaattttctaaagtgtgtgcttaggtcattgattttcttcctctcttgttagctaatatgtgtatttaaagataaacatttccctataagcacagctttagctgaatcctacattttgatatgtcaaataaatattttctaatttctactgtgatttctcttaaatcatgagctatttggattgctttgcctcattttcaattatttagacattttcttatccttagttattggtttctagctaattccactgtagtcagagaacatattgtgtgtttttagcatttgaagtttgttgagacctactccatagtccagcatgtgacaacttttgttaaatgttccgtgtgcacttagaaaaagaagaggtagtgtgcagttattggttggtttgttctacaaatgtcagttaggctgagtgtgtaaatagtgctggtcaaaatttctccattcttactgacttaaattatctttttgtttatcagttgctgatagaaataggttaaagcctacttctataattgtggatttatttctccttttagatctggcagtttctgctttatgtatattgaaactattctagcaggtactgtagatttagaattgctttttcttgtaggattgaccctttttgttattataagataatcctctttaccttttatattgtttcttttcttaaagtgtatttcatctgatactagaatagctacactagctttcttttgattagtatgttcatgaaatatctgtttctatctttattttcatcttttctgtgtgcttatattaggtcttatctcttgtaagaagattatatttgggtttttttttaatttagcataaaatctgtcttttagttggaatatttagtctatttacacttaaagtaattattagtatagtactatcacaatattaatatattactattttaattagtttcaacttttaccagttcccccttttctcccttctgaccttttaaattaatgaggtcttttttcaatcattgtgcttctcctattagcttgttttttctatattttttattaccttatagattacaatgataattcctgacttatcagagtctaataaaattagtacatttgctagctctcaggcaataaaataatttggaacatgtttagtaccgtttttttcttgactaccttttgtgttattgctaccatgtatttgaactctacatatattttattttattttatgttttatttctttttgagatggaggcttgctctgtcgcccaggctggagtgcagtggcacaatcttggcttgctgcaacctctgcctcccgggttcaagtgattctcctgcctcagcctcccgagcagctgggattacaggcatgcaccaccatgcctgcctaatttttgtatttttagtagaaatggggtttcaccatgttggccaggctggtctcaaactcctgacctgaagtgatccacccactttggcctcccaaagtgctggaattacaggtgtgagccaccacacttggccttctatatattttttaaatcccagaagacattattatgatcttttaatagagttggtattcgtttagatttaccgacacatttgtccttctgttgcttttaattctttcctatgtttttattcttccatctgagatcattttatttttttcttaaagagtatcttttagtatttcttttagtaaggacctgctggtaatatagaatttagtttttgtttatctgaaaacatagcaatcttcaattttgatagctatttcttactgggtgtagaactataggttggcagggttttttttaaaccccttttgtttttctttcttcttttctttctttttcttttccatcttatcttttttttttttttttaaggagtttgtcctcagactttgattagttctgctgaatcagctgtcagtcttattgttgctttcaattgaagtggagcactgcatctctcttttaggatgccttcgaggtatttgtctagctttcatgtttgtactcagtaggtaagatggtctgcaactatgtagccatttttcccaagagaaatttcacatattaaatggctttggttttccacagatgatgttagagatagcaagtggaggtagagggaatgaagggagatcaaatcaagagaggttaagatagaggaagtagctttacctaaggtgagtagaccctagacaactggcagaacgctgggccaaaggaaagatatagggggcaggatggcattttctgcagataaatgaccccagaaattcagacactgtgatatccaatattcactttatatctctctttattgtgttgtatttcccttaagtaagtgaggttcagagaggataatcagcttgtccaacatcaaacagccggtcagagtgacaggctgacattcaaactcatgccagtagactctagatcccacacctttcgctgctgaactatattaaagatcagaggcttttaaagttttcttattacaaatcataataagaaatacattttgagtctatacacatacattagtaatcaaaacaaaccttccactaatggatgttaaccatattacccgtgatgcaccatgagctttctgttgtattctattctattccattctgttccattccatttcatttgctggatcaacataagtgggttgggccctggcttcaaataaaaaccactgctaaagacaggaacttaccttaaaggttaaaaaaagtacataactccgattagccaagaaaaactcagaaagtgagaaggaagggcaaaaaaaaaaaaaaaaaagtcacttctttttgtctttcaggaattttaataataaaacagctttggatcacctattttagattcttctagtagacagcccccagtagattccttaacttttcaaatggcattgaaaaagcgaggaagttatttcacctctttgggaggctgtctcagtcctctctatccattggagggcagggcagccactcaataagtgtctgttgcatgagtcaagtaaaggatcagaccggggtgtctcagagccttccctgctcttctattctctgttaagccactgaatgaagaaggctgccacattttcctctgggtcaatatcaacagcaaaacaatatcccagaacggtcatttctgggacaataaatagttttccagagctgctatcttaggcctctctgccactaagggattaaagagaaatgcacacccctccagaatttcctgtcctgtcttgcggttaacttaaaacattttcaactcccgcctccccctttctcaccatctctcttcatggttaaagaggttataaatttgcaaaggaaatgattaagcaaatccagaaaatttggccatgggacctgatttttcaaggccttagtttttgaaagctgaagaaatctgtccactgaaggatttgcacatgagttttttagtcttagggctggggcataatttcctgtttttgtattctcaaaactgttaagctacttgtgaacaactggccagcaaagatagggagggggcaggggatgcggagagagggttgtgagcccagaggggaggagaaaggctgtttctcctcagttctcacagaacctctatgaaaatagaaagatttatttatttatttactttaaagactgtgaagtagagacaaggggtagattctagacattgaagttggaggtgtgagtggtaaagaggagaagaaacatgttttagcaggaacttgaataagctgattgaaactcaaagaacagtctgtttccataagcatgaacatttcttagacactcattttgtgctttgcatggaatacatcgttaaatccccacagcaactcagtgaggtggattctactagtgtctccactttatggatgtgaaagtgaagctggaagaagttaaggaacctgctcaaagccacgtggctagcaagtagcaccactgggattgcaaccaaggctgtttggacccagagcctgtgttcatagctactgctctcttctgaagataaaggaggagacaaggatgtcagcatgaccatagcatacatgttcatttatttagagccagggaagggggtgggacactaatcaaggttgccccttcccttcacttcccttcccttcccttcccttcccttccctcccctcccttctcctcccctcccctccccttcccttcccttttttctcctcttaaagccaccaactgtgctaggtatttgtatgtttactctcagatcatttttccaagcttctcttcaaactgcatttcccaggttccattaccaactggcttctggttaagttcagccagtgggcggcactgacacgtatttttcctgcctcctccctccagtcaacaaaaaggtactgcttgcagaagcctccattgggttccagctaccctcaagcagcctcacccccatccacatggggttctatttcccacagggtgccgggttccctagctccagaagcatcacctcttccctttggctgtgtgtctctagtggtggttctttttgtagcctatttctatttctttctttctttttttttttaaattatactttaagttttagggtacatgtgcacaatgtgcaggttagttacataggtatacatgtgccatgttctatttctaatctccgggtgggcctcacggccccatggttgtcttttcaactcttccagtacctttaaaactagcacccatattaatgtccttctattcagctccttgtcatgggatagaggttcccgagaaaaccctaagacacagatcacagatttttcttttttttttttggaacaaagtctcgctcttgtcccccaggctggagtgcgatggtgtgatctcggttcatggcaacctctgcctcccgggttcaagggattctcctgcctcagccccccgagtagctgggattacaggcgtctgccaccacacccggctaatttttgtatttttagtagagatgggattctccttcctcagccccccgagtagctgggattacaggcgtctgccaccacacccggctaatttttgtatttttagtagagatggggttttaccatgttggccaggctggtctagaactcctgacctcaggtgatccacccgtcttggcctcccaaagtgctgggattacaggcgtgagccaccgcgcctggccgacacagaggtttttaacctaagacacagaccctgagacaaaaacttaggtgcaagtagtttatttgggaagtgatcccaggaagcacaaaaggtggggtgggggggcgtgctcatgagtatgttactgctgtgggtgacgggtggctcggtcttgctgaggacccttgagagaacacaaagacgacccctcaacattgtcccactgagagatggggcagctgaggtgtttacctttcctctcccatctttcactgattgagaattgtccttcggggcataaaatttcaggtattttcaaaatgccatgcaggtgggctaaacaagctcctacagcccctggagaaagccaccgagaggaaaagcaaagaacgaggagttttggggtgggaagctgtcagtgctgcaggtaaactcgggtagtctgaagacgatggggcagggcagccacagcacctactgccatggcgacttggccaccgttataagtagatgcaactgtacaaccaaggatagccaagggtggacctgagccccctctccagaaattctgccttactttagaatggggtgaacagcagggaaaatgaacatttttctttgctttttctcctccctcctttcttttttctagataagccagccagccaactgcttatgaggataaggagaaactggggcaaagtttaaggatgtcgcaaagtctgggtggccttcagtccatgaaagagaacacatctgttctatctcaggctgaggtcatctgcatcctcatcaataagctgactgagcactcattacctgccagacacggtgcctacatgctctaaatgcacggtctcgtttattctcagcaactttccgaggtaagtgctgttagcattcccattccacagaggaacaaactaaggctctgagaagaagtaatttgctcaagacctcacagcctgggatcatgggtatgaatcatctgggtgaatgatgaggccaaatcccaagtccatgtttatgacacttagaaataaccatttaaatgtcctttgaagggtcaaaaccatttagaggttttatctctttcttacaatcttcaaagaagtttaacaccttataataaatatctcacagataactcaggtcacttagtgaatattagttgaattgcttttgtattagatcctacctgcagccaaaatataaatctatgttaccctccagctcaaatatcttccatggctccccattgccgtcaagagacaatttaaactcgttactatggactttttactccaagtccttgagatccatctgtgccacctccccagcttccatcctcttatccgttctcctcacagtctcacttcagccatgctaagctacctgccattctctctgtggaccctgggctcttgcacttgctgttcttctgggagcccttttgtccaacgcttattcattctgtgtgagttaactcaactgtcacctccccaaagtggccaacctccacccactgtggtcttgcgccagtgccttcccctgagtcccatgacaccctgcatttgcttctcttacattgtattattattatctttttgcctgcctgtctctcccacagacatgaaagcaagcttttatgtacttaggttggatttcaaccttggctctgccatgtgtgttcttgggcaaagttgtttttttctctgtgagccttagtttcctcagctgccaaataagcagtgaacaaagttaagtcatgtgacacacaatacctggcatatagtgaggttcaatgttagctttttttatctaagcatcttcagggccagtctttggaccaaacatgctgttgatgctcagtgaagtggtagctctacctggaccagtggttttcaaattttctccttcattggaacctcctgagaggctgctaaaacacaggttactgggtcccaccccaagagtttttgattctgcgggtatggagtggggcttgagagtttgcattcctaacatgttctcaggtggtgctgaggctgctggtcctgggactgtacttttagaaccactgggctggttacctgggaagggtagatgtctggttagggtgatcagacattcagagctaaaacaaattcacactagaggataaggcaatccacaatgggtgtggccacaggatatttgtttagcaatttatccattcaaccaatatttgttgagtatctaccatgtccaggcattgtgctagacactgacaatagaacaatgaatgagcaagacaagaaggttcagatcttgataagttcacattctagtggcactgctttggaaggtgggggccgtcattacacaaatcccatgggtgtgaattgaagggacacagttagtttggggaatggttagccttaaagccactgataccaataatggctttactgtctactgtatcattgtattgccttctcaacatgatttcaccaaaatgattcattgaaactgattatggtattcccataatccccttgcctggaactgcatccatcattcagcacagttttaggatgaagtcaacccatggaacatggcagaatggagtgtcagagaaccagagccaggctatgagacttaacaccagttatatgaaacgatacatttcctcattatcgttgttagctggaagagagtctcagagaatcaaagccaaagatgttatacaacacctattatatgaaatgataaatacccttattgttacgattatctgccaattcaagtaggggttttctgttacttggtgctaaaagttccccatgatagaatagcttgcctttcctaagtgcttacaatgtgccagccactgcactaaatgtttggtatgcaccatctcactgcatgctggcagcaactccacgagtaggctctattattagcccattgttgagggaggacactcagagtttaaatcacttgctctttagttgggagtggagaagatgagaggtaaggctgctttgtggagcaggatgggccagtaaggattacttaaatgcattgcaatgacaccaactgaaacgttttgcaatcacacaatcttccttgagcttcttccaagatagagcagataaggatggaaacacaaaccaaccaaccttatcttcatttggaggactgagaatcatagaaggcaactgacttgcccagttcagctttctcgttctagttctcctaattaaacttgactgctttctagaagttaatcaacaaatacactctcaggctgctttggcccagtttcccggttaggcaatcagggaaaaagggctaggcattgtaaaaccccaggtcctgcagctcccccacgtggctgcattttgacaaaagcaagcttctgagagagtagatcacgtaaggaaccagcccttccatggctgtcattagcagaagtgcagctgggggccattttgtcaagaagtgcttatttggaaaaacaaaacaaaacaaaaaatgaaaaaaaaaaaaaaaatctatacaggtgcatgccagtcccccggtaatgaaatgtaacaaaggaagcacttaagttcagtgagggaaatacagctttaaattacagattgtacccagagcactttataaacggtaatgtgtgataatgtattatccttacttctgtgaaattgtggactgcaacttctgccggggccagttaaagggccaggagatggagagggttgcgtgaatgccattcaagaaaagggcaacagaggctaaggggttaaactccccagaaaaccaatttatgcaaagggctggatcctgaccggcattctgcactaaagatctgaattacaaatttagagaatttgctgctcggtaagtaatttcttttcttcctaatggagactataatttccagtgggccggtgccacttaatttgcactgatagagtgaacaaaatcttgaccacggagaagcctaattctactcaccgtgcaaaattgccctttaaaaaggcttaaagagggacattcaaaggatggttaaaaccaacccctataatcttacattgctgcaaagcacattccctagtttcccctgtgtttgtatcttgggttagttaataattggaattagttctttttccttccctgtaaggtaggtagtgtagctgattttatttttttaaggtataagatctacttgggattatctgacataagaaataacattgtcagattcagattggagaaatctgcacccttccaggcactctgagaagggaaaggacacagattcttggtttcttgaaatctaattctttaagacacttagaatctaatttaatgagaccccagtgcttctggactgtttgcaaacagacaagaacaatctagtgtgtgtgaagtgggaggagggaggggagagagtgtgtgtttaaacccctgataatttatctaaaaagcaaggggatacatacaacaaagaccaggaatttcactttctttctcttttccttcccattttggtttctattttgttatgtgcctccttctccaagacaacgaatgcaggaaggacctcactggctgctgggaacaactgcccttttgaatgaattcttttatggttaccagtcaaaaagtcaccgtcagctggaactggaagggaggtgtgtgtgtgtgtgtgtgtgtgcgcgtgtgtgtgtgtacgcgcagtggcagccatttcagctcaatagctccattcctggaaaggccacttcttcttgacatgggagaagacacacttccctgtgtacctaaaaataaataataagtaaataaataataataataagaaagtcatttttgctccctcccccaggtcttaattcttctttctcttttaatcatgtttttctgtgtgccacctttgctttgcttatttcccccactgcttgttctgtctgatggcatttctgggaatctgtgtcctaaaggctttcttgggtttattggtgagtttcagctctttttcactctagttctgcataaggggtgggcattagtatttattgtaaatgcattggaaatgggatctcaacaacaataacacacacacacacacacaaacacaaaaatggagtattaacttgtttcttaagccataactgaatttagagttctcccagtaagtcatgcgctttacttctctctggcatttcttgcttttttaaaaaaaagcaatttcattaaaagactattctcttttttggcccaggagcataggaaaccagttataaaaactgttggcatgctttgcagagagattctcagcaaagaggctttttttttgttttattttgttttgttttgtttgagtgggggcttgggagggctccatctgccttagtaactggctaagtaactggcctgggctactcagtctgtttctcttcctcctgcctaggggcatttcttatctgggcaaaaagcccctgtacccagcgaggtgaaacttgcaaatgatactgtcaccttcctcaatggactgcagctcaggagctcaccaaaggttgcagcagacaacccccacggtgtttggagacaaaggaatagcagctgcctggtttccttgaatcaccccgtgctctgacgatggcagtgatgggcctcccaccaatggcttccccaagtgctgttttcctgcttcatgccaagttaagcattctgatactaagcggcacgagatagttctcaactgggtgaggcacaggtgtgagtaatctcgaggtatggtcaggaggtttgaaaaaactaacccagctgcaaggaaaagacctctggtctttattggaaacacgaatttgacctgtccaagctgggagctaataggccccagcagctcaggatcccctcctcacttacgcttgggttttgagtgataccatatttttctgaacacattttccaaatgcctatttgccaaagccgtggtgtaatttgcctaagcagcaaacttgtccttagagtcgaggtccatccacatcaggagagtatattcaatgtttatctccgatcaatgtgtgatgaattgcatatgagatagatttgtgtgagccaatgtgtgtgtgtggatctgtgttagttacatgtgtttatttgcatgtatgtaaatatgactgtgtgagtgcatggatctattcctgcatgatatatatttatatatatgaatatgtgcatatatatgcaaatatgggtataaatatgtatctgaacatataggtgtgtatctgtagtggacactgtcaatgcactcatcctccagttacttaggcatcccagcttctcagctcaatgggggccgcttgcccatccccccacctcccagggcagcccagaattcacctaccagggttcaaaggctggctcccttgactcaaggtcaaactatctgggtggtgcaattcatgctccagttgaaaccaacccttgcccaactcttttcttgccctcttctttttctcttactccctttccctcggagcccactctcagtatatcctatgcgtccaaatccccatctcaggctctgctccaagcaacctggcctaagacagcactattctatacatgcatgtgtgtgtacatgcaaacatacaactgcacacatttgtgtgtgtgtgtgcccatatacaaggaaatccgggaagatctgggagagaatgatcttccaaagaagataatggagaaagagtatggattttataatgtagaagttagagtcatctcagatatagagtgggactgctttgaagttgaaaattaaaagatactttagaagtaaatgtattttttattaaatcagaaaaagaaagatacagtttacatgactgtcagtcaatcatatgctactttgaattacattttaatagactcagggtcctatttactcctttgtacaggtattaaaaacaactcaggtatttgagaagtcttctgtaaatttttattaactgaggttatggggagggttttatcagagcacatcctgagaacattaggaatgacagacacacttgagataagtgtcagacggaacagatgaagcgagcccctcagccatctgagaaacattaataatgtaagatagcagagaccaaatctttgttagggatacagtattacaggataaaaatggggaccttgccgcccccttgtgttgcaaaataaccgtgcaacttcctttattttttatttattttttttttttaagttgtaatctttgccgttgtcactgagcctcaaaagcaattgttttcccaaatcattttaagccctccccagtcaatcttttccctctcatcaataacttacaaggaccctatttgaaaaacaacgcttattcattcctttttctataccccacacattccgttctaggaaattggcaaccacccaacacagcccgggttctccctccttgagatgtgaatttaaacaaatggattttcgtctcccttcttcaagcttagaggataagcacgcatttactacaacgcttaattccttctagcagcatttctcttctataacttacttgccactgcctttttttttttttgatagaatcttgctctgtcgcccagggtggagtgcaatggtgcaacttcggctcactgcaacctccacctcctgggtacaagcggttctcgtgcgttgggctcccgagtagctgggactacaggtgtgtgccaccatgcctggctaatttttgtatttttagtagagacggggtttcatgatgttggccaggctagtcttgaactcctgacctcaggtgatccacctgcctcggcctcccaaagtgctgagattacaggcgagagccaccacgcccggccaccactgccattttcatcacttaacccgaacacattcctctattccctccctttcctgcttggtgatcatcgactcttctgacccaactaggtgacctgctaaaccatctttactgttatttgccagaaaagactggaccagagacgtaaataatacacctcaatatacaacagctcgggcttaatttctaggcagaatttcatttgctggccatcagaagaatatatacatggagcgtgtttggggaggagatggagtaaggagaacacatcttggtggcaggagaacctggtgggaaccgtgctgatttgtttacttggatttgccaactggtccgatggatactgggtctgtttgcacttgagcatccaacatccgctttggtccctggagaaaaacagaaagacgtggcagcctattgaagctctgtaatgtcaacagcaacaatggccatttatgtagcacttactctgtgctaggtgttgggctaaattaatatatctcattcctcagtgctgggtaagagaatggtctccagtcagatgcccgggttcgatacccagttacatgactttctagctttgtgaaatcttggacaaattacttatcatctctttgcgctttggtttctttatctttaaaatggaaatgacaaacttatctcagagggttgttcccaagataaagtgagttcatgcttataatgtacttagtacctagggggtactaattctacctcactttagctccctccccagttaccatctaggttcaccaccctgttttattttcttcttttttttttattatacttttaagttctagggtacatgtgagcaatgtgcaggtttgttacatatgtatacatgtgccatgttggtgtgctgcacccattaactcgtcatgtaacattagatatatctcctaatgctatccttcccccaaccccccatcccaaaccctattttattctctctcagaacataccactctctgaaatgatcttattatctaatttatttgtctaacatctgtcttctacaccagattggaagctgcaaggattctgcgtgtctcagtgccttgcaggttcctagcacatggtacctagccttaacattgactgaatgtgggtgaaggaatgttgtcaggcagatacaattattttattttatttttttgagacaaagtcttactctgttgcctaggctgaagtacagtggtgggactatgttcactgtagccttgaagtcctgggctcaaatgatccccccacgtcagcctccccagtagcttggactacaggtgcacaccaccaaactcagctaattttaaaattttttttgtagagacggggtctcaatttgttgtccaggatggtcttgaactgctgggctcatgtgatccttctaccttggcctcccaaagtgatggagttacaggtgtaagccactatgcctagcctgagtactattattattattattactttaccgtttctgtcaagtataacttataagtagtaaagttaaccttttctgtatttggttctatgaggttagaccaacacaaatagccccctaaaaccaccatccaaatcaacatgtcacatggttctgtcccccctcagatctttcttgtgccttttgtggtcaaccgctccccaccgcagaccctggcaagcaccgatctgttttcatccctagagttctgcctttgccaggatgtcatatcatgggatcctagagtatacacagcccttcagactaacttctttcatgtagcatagtggatgtgcgattcatccaccttgctgcatggatcaattgtgggcctccttttatactataagacagtatagggtagtacagtataagatttatatattgtatacagtatatatatatatatacacacacacatagagagagtatagtatagagtagtataataacgtattgtagcatagtatatatagatagtatagtgtagtataaggtaatataggatagtataatatagggtagtgtatattttatagtatatatagtatacatatatagtatagtcaagtatggtaactatagcacagtatagtttagtccactgtatagtatagtaaataaagtatagcaaagcataatgtacaatatagtatgatatatacagaacactatagtatatagtataggaaagggaagtataatgtactatcacaaagtatgtatggtctagtatatgtacatagtgtcatatggtttaatgcagtagaatatacatgatatcgtataatatgtaatatagtatatagagtgtattatagcataataaatagagtgtagtttagtatacatgatgtatatagggcacatatatagtatatgtatatagtacatagactgtgtagtgccctgtataatctagcatagtatagtatattgtatttactacatagtgtagtgtaatttcatgtaatttaccaaggaatcagattgctggtctttgaacgccagacctgccacttcctagctgggtgactttggtcaaattgcttaaccctctacttaagccttaattttaccgttgataaaatgggaattcacagggtagttttgaagattaagtgttagtatatgcaatgtactttgaacaatctttgtcacacagtaagtgtgataaaagagttatgattatttttagtggtggtagttgaattcactacttcattcaacaacatatattgaggacctactgcagacaatacattgtgttattaatagttttggggcatcaagagatgaccaggacaccgtgaaataccaaaagcttgggctcaggagtcagctgtgggtttggggatgctccatccctttctggttgcatgacctctggccggtccctcaccgctgagagcctgctgcctcatctgtgtgaggtcttagactgccatcccacccggtcctcactgcagcccacgaggttgacgccactgtcgctctcaggctacagaggaggctgctgaagcccagcgagcccaagccacttcagtcaaattcctgccagtaagtggggtgccggcttctgtccccgatctctgaaccctgagctgggtaaaggccattccccaacccctccatttaccgtgcattgtaatcgcttgttgctgtgattagagcacaaactccccatggcacagcggtgcccgactcatctctgcacctttacaacccagggcaggggctaactaaataatactcacaaaatagcctttcctgactagttaaacctcacaagcattgctctaagggcattgtacactactgcccttcatcttcatgctaaccctgtgacgtcagcaccattcacttcattgatctggtatctgaaactcagcaagatgacaggtccaagctcactcagccactagatgagagctaggttcaagtccaggaacaagcttcttgcaagtgtctagagcctggtctcaggctggccacgggtggcagccatccatcctgcctctgtttgcccagcgtgccttgccgtggatcctggttcacccaggctccaccctgcccagtcaactcacctctattaaagcttacttccccgaggtttccatcctttaggttccatgagcttgatcttggggcttgatggactaaacagcaaactcagatggccaagtggctgccacgggcctgaactttgcaatagatgaacttgtacaagcattttcttcatttattaaaaaaaaattagatgctggcatttaaaaattaggtatttgctcttaaaaattctccacctttgttattttctcttgactaaatggacaggtcctgccacaatgggtctgcagtcccccaaggtaacatgtggctggtgctgaggaggggcaccccctttaggtgggcacctgcccttcaggtagccacagaccacacctgactcactggcctcatacatacacatgcccttctggcctcactgggactccaccttggaggccagagacataaatgcaacccctttcctgccttatataccaggactacacgtcacagttcacaaggccaaaccagacccattctcttacctgttctctctccagcccagtgaggtggacagtgattattattcaccctattttacagatgcagaaactgaggctccaagatgacctaggactaggtcatgcggtaacggcctggccactttgacttggaatctggccctcagctcacctgttgtccccggctctcttctgttcactgcccgctctttccaaccctcggtctcaggctccttgcagtgactgcgctgattgtcacaagcctcggttcagcccacaccagtgtggacagatgtcttcccttttcaagcctccatttgttcacctgctaaacctgcctgcagattgcgctgcacacaatctagcacttcaggggctcatgaaaatgggaaaggggaaggctgggaaagggccatcaaagaagtggtgcttaggggaagggagaaacccagtcttccatcaatcagaatagtttcacttttatcatatgtgtctgtgtgtgcgtatatgcatatatccgcacacacacacacacacacccaggttttgtgacattttcttttgtaaacaaaaaagtccctttgctcaaaaagaaaggaaaatgttttcaaacagttggactttgtgaatgccaagggcttccttccagttcttttcagatttttgaaaaccaagtgggttgctctcagttagaactcaagtagcatgatggagaaggaggaaaaaaggacctgactaacgaggacgtcactgtgagacaaagatcatgcagggatcggcctgcggtgtgtctcatttcctgtgggtaacaggcaccacaatagttctgtgggtggtgacaggctcggctgccagcattcccctcccaggaaggcggtcaggcaaccctggggaatgtgtccagcttgaaagtcttcgaggcttggtctttggaaagcggcagggaagcccccctccgtcctccatcattgctggaggccttgtgacactgggacgatgcaggacttggggtctagggggcctgagctgaatgctgcctctgtctctgacaacctgtggaatgttcagcaaaagacacagcttcttggaggcctggcttatgtgtctgggaggtgtggcagaagcagtcccagcctgaagggatgctgccatcctaaagagatgaggtctgtaaaggagtgtggtcccagaggagggactcggtgtctagaactgtaattagtgtctcaaacctgtccacttcttgtcacttcttcaggaatcaccaggccaatctccatcagctctcccaagaaatatgacctgtattaactagctcctaatgaccttcaacagccattctccaccacagcagcaaaataaaatcttcgaatgttatcaacaggggccaagacttcttacttaatatctgtgagtagcttccctgctcagataggattatgtctgcattccttgcacagcccgtacagcctgcatgaggaggtccccgcccacggctccaatcttacttccatcattctccccctaccctacctctccaccctcagcaaccacggccttgtttctcttcctgaaatgtactaagctcactaagctcattcccacccccgtgcctttgccagggctgtcccctcctcctggaagaaagagccttgctctcttcctgtctggcacctttaacctttcctgtctcatctcagatgtatctcctcagagacaattttgggatccaccgattaaaagtagcacaccccgcccccagacacactcaggcaaaagtagcacacacccccccatccatactcaggcaaactctatcgcgggaccttgtttatttccctcagtgatctcccagacctacaattttgttggcaaattttgtctttaattttgtaattttaacgttgtagttttaataattttaaccttgtttttaaacttatctactaatactttttagctgcatgcttccccttcgaatatgaacccctgatgtcagggaccctgtcccctttgtttgctgaatatacctccagcgcctagttcaaggcttggcacatgtttctgcaaagggccagttggcaaaaattttaagccttatgagccatgcagtctagtcaactagtcaacccaaccagtcaaccctagtcatgcaactagtcaaccctcatgtttttgtgtgaaagcagctagacaacatgtaaatgaatgaacatggcaatgttccaataaaaatttatttatagaaacaagggttgcatttttaatacccctggtctagctcactgccaggattctaaatattctacaaatatttgttaagtgaatgaccagattattagaaatcatctgaacttttccataccatctttctttttcagccttcgtacctattgtagaggctggcttctattaaaataattagaagccacagtgtaaatcattccctgggtggtgttcattttaaatgaatgaataaatcatgggttaaaaacgtgtaaactaagaccaggcatggtggctcatgcctgtaatcccagcactttgggaggctgaggcgggcggatcactcgagctcgggagttcgagaccagcttgagcaacatggagaaacccgtctctactaaaaatacaaaattagccaggcgtggtggcgcatgcctgtaatcccagctactcgggagactgaagcaagagaatcgcttgaacccgggatgcggaggttgcggtgagccgagattgcaccattgcactccagcctgggcaacaagagcgaaactccatctcaaaaaaacaaaagaagtaaactacaagaaatccaaatactttccccaacatctttcctggtcctttaggaacttgctactcaaagtgtgatccctggatcagcagcttttgtagcatcaatcaggagctttgtggcatcccaagttggaccccaaaactactcaatcagaatgtgtgttaatagatccctgggtgattcgtgtgcacagtacattttgagaagacttgcgttggcaaatccaatacagcctcacccacttgggtgaagtccttctctcagggctacaaactggcattcttgctttacatcaacatctgccttcctcacatcaatgaaaccactgcaaggactacatgattagtttgaagactgcactacacccagaaagaagaagctaataaggaactattacatcttgtgggataggagagagaagctatgagtgtgaatgtgctttagatggaatgcttaataaatatttttggaagaaaaatgaaagaaggaagaagggaaaaaaggaaggaaggaagggaagaaatttcagtggtttccatatgtaaatcaaatgattagtggatacccactttcagtgtctccattctcaaagtgggtattttttaaacatgcaagtagaaattgttaagtgtggttaaagttgagtacaatgttttatcgaagggtaacaatttcaagtaatgtattccaactttatatatcatattttggtatctattattttaatctcatccattcattcctttgtctatcaagcacctgctgtttatgcagtcctatttcaagtccttgagatacagccttgaacctgaaaggtggtgccctgccctcatggagctgggagtccagtggtgaagaggggcttccattttgtagaggagagtaaaataagcacatctaaaacacctccccaccagtctgcctaaaattgcaagcagtaaaaaaatttcctctgcatctagcagccattgattctatagtccatggagtaacacaattgtgcatttatacccctgttaaattaaataagcaggaggcctttagcctgaggcagtctccttactcccagtgtctatgtaacaaactgcaaccacatttagtaagtaaacaaaccaaaacctaccttatgagtatccttttttttgtaacaaatagccatgttgcagccaatcacaaatagctgagcttcagccaatcacaggcaaccaattgatcagaccattcccaaataaggcagacaactcatcacatcgtgaccaaataaggcaaacacctcattgtacccaatcagataagttttctactttgcttccatgtttggcctataaaatcttactgctcatgccactgggcagtgctctctgaacctctttgggttttgagtgctgcccaattcatgaactgttctttgctcacaacataaagtgtgtttaaatttgatttgtctaatttttttaacacgtcaaattggtataatataatgtaaataaaatcagccaataatgcattcattcattcattcattcaacaaatattacccagagcatctgctacgcacaagacactgaacaaaactgatgatgatgttgatggtgatgatgacgattacttctacatgctgattgctccctaggtctcaggcactgtgctaggtgactagatgcagtatctcacctgtttcatgaactctatgagttaggcatcattatgtatgaacagataaaaaatctggttcagagaggcaataatttgctcaaggtctcagcttgtaaaatggagaaggattgaacctgctggaagtcacatagcagttcaaaaaccctgagtgatagacccgggatcccagtgtgaagagccacatgtagaatttgaaaaactgactggggcagatggtgttggggaaggagagagcccagaaagaagaggcaaaaaaaatccacctaccaggcctttaaagaagcccccaagggactgctgccgcttctcaggtctcttttggagcttgtccccattctgcagtgagttcgtgtccaccgtggcctgctctgtgcactgggctggttctttggcttcctgcttgttgctcttctgcttgttcatctcggctgctgacttcttgtccttcgaggagccctctttacccttctgtggtgctcctgttggttcaggctctggcggtgtgatagtcttttctgtggagtctgatgtctacagcaatttcaaacaaagtacatttttagtggctgcaggacaactctcaatagcaagggaataaatatgttaaaacagagatgttcaaatgttgggtggtatctacattttcatgaatcctaggtgaaatgaatataaaaaaaggtaaaatgtgcacttatgaagtcatggtggggacatttatttagttatctaataattcattaatacattttatgctatcccagaaagcactctttatcccttattctggaaccagaacttggcttttccttggggaaacacccttcttcctcatctactccgtgtggtccaggcaaactatttccacctccagacaagagcatgtgacttaggcctgactaatcagagcattgtatatgattggccagctgtgattggctcagcatagccaaatgcagataacactggagctaatctcagagctttgctgaaatgagagagaggctggttccctttctgttagatctgaagctgtgaaaatgtaagactggagcttccagaaccaccaatatttctagggaaaatctccccgaaaaggaagccaacacagagaaaatcacagctgagaaatggagagagagagagagagagagagagagagagagagagagagggaccaggcattgatggtatcatgcgtgcctcctagatctagctgttcctggagcccttttatgcttaagccagctttgaaggggctactcccacttgcaaccacatgcgagtgttttcctggggatgcccattcttttcttcataattacatctaccctaatttttggtgtgaaattgtccttttgcttcatgaaatggtggtaaaagagatgattgttttattagtttggaatgtatatcgttttttgtcaaactgaaaggtttacaatcccacatgcttccaataatttgatgagatgaggctgtaaaatccaaaaatctagtaaatgcaggctggggtaagaataaccatgtggatatcttatttctccagctgcaaaagcaacaaaggtccaaaaaaatatttctccagtataagaaaagcaccagttcaagcaaggctggctttgatgttggggagaaaatttagagcaggggagactgaatgttacatgccctgtccaaagggcaacagttgctctgatccagccaagagataccacgtaggcttgcagccccagtgtggtcagagcttctgttgtttcaagacaaccttgaaattaaattttaaaaaatgcaaaatgtcaacttttaaatattgacttcaaaagttttaaagccctgattgtggcaactggcaaacacacttgacccaccggatacatgtgtataagcatgattcatgaagttatgtactgtacccaggtaaaaagttctacaacaaggtagcagctttgatggagaaggcatcaactgtaggagaactttcttttcacaccagtgaatcatgcacgccccttagaagtaagcgggaagacaaacagcagagactccccggtccagaaggcctccaccggtgctcttcagagggcagaagtccttggagaaagaagcaacaggcatccagtgtaccttgagaagctcttctgtaatatatgtcttgaacacttctggcagaccccaactgtcagagttgcagcaaatgctaagatatggatgtccaagtacaatagatatcccagagcagatactctccttagaatgaaacagaaactctcaccacaatgctcttcagaaaggccagaaaccagagatcccagttcaaatgccttgttaactgtttttgttgtgtagaagattttaagatgcagtgagtggctaagaactcagtgtctggagtcagaaggacctggtttgtttctaattccaccataaccttgctgtgtgaccaaggataaactgacctcctagtttcctcatctctatgggagcaataaaagaaatgacaccttatggtgctgtgagaattaaattagctaaaaatggaaaggacacaccagtgttctcaagtctgaatccaaggctccggaaaataaaattcccaattggattctgaaaacactcctaggtgggatgtttctagcttatttggatttgtatggatgtcattccaattttagaatcaccaagattattggcataattccttcactgtaaaattccagacaaaatataccatcatatttaagcttgtcttaaaagcttaaatatgaagagtatagtaaaaagcaatatatttcctgtttaaaaatgtaggataaaccaattattatggaaataaaaatacaaaaacatatttacagtcattaccgtccatttgtgagtgtgatatgggcaacattataagatggaaattccctatcagcagcataatagtaatagtaacatatagacactgttaacaatagagttgtgcccccaccccaacgcatatgttgaatccttaactcccaatgtgattatatttggaataggaagtaattaaggttaaacaaaggcatagggtggggccctgccccaataggattagtgtccttataagaagagacattggcaagcttattctctttctctctctgccgtgtaaggacacacaagcaagaaggtggccatttacaaaccaggaagagagtcctcaccaggaaccaaaccctgctgatttggttactccttaatcctatcctttccagccacaagaactgcaagaaaataaatttctgcttttaaagcaaccacctatggcattttgttatggcagcccgtgctgactaatacagtagctaacatgtattgagccctctataccagaaatgttctaagtgttttacatgtattgattcatctaagtatgacaaccccataaggaagtacttttcatagctcctttatatagatgaggaaactgaggtgctgacagatttggcaatttgcctaagtcacacagcaaaaaaaaaaaaaagtggctgagccaggatttgaaccagacagtttgagtctaccactcattcttgtagccacttctctatattgtcaaaactactagaagaatatttgatgccattttttgtggaggtgtatttttaaattaaaaaaagagtgcagctgcatgatcctatttaaaaaaaggaacacatgtagttataaatatgtcatagctatgtttctttagaataaagaaaataatgaaagcaaactgtgtgaccccccgactccatgtctttattctgttcaagacatagattctagtacttgccaaacaccatgcaaggtgatagagaaatagaagaaggagacttcttgctccacagacattccagacagacatgagaagaaacaggggagataaatgaattattacaatttgtgatgacgctatgaaataaaagaacaatatgtagttatgagaggcagatatggaaggtctttttgaagaggtgacatttatggcaaaaagtgaagggtgagaagagatttttaatgcagaaaagagggaagcacatgtgtgaaagttttttgataggataaagctgaggaactctagcttgttcatgcttgtgtctgcagaccccaacatagttcttggcatatagtaggtgcttaatcctgagatattaaatgagttggctgtggctgagaattttattgaaaagtatactgtgaagaagtgagaatacaccactaatcccaccaccaaactgagttcgaggtcacttacttggcagctggagtctttcccatttatttcttctgagtgggtgatccctccatcccctttcactgactaaaataacaaacagacaatggccttcagccacaagtacagtgacgtggagaatgcaagaaagttctgaaatggatgatctcagtcatttatcattgaggtttggggtcaagacaaatggaaggccaactggaaacatgttactcattggatatagagatttccatgcaatttctaaccagatctaattaaattcaagtgttggcctccaaaaataacaacaaaagtactaaatcctggaattaggcaattctgagataaatgatgacggttccaattaatgttggaagcaggagatagttgaacatattaaatgaagactgaatgaacaattgacccatgagtagccttccactgggaatatttaggctgtgggtgttttattgtttttttttttttctctccttgatagagatatgagttttgtttaatatttcattttccaccctttagcaccccctatagccagcaacaccagtgacagggataaaaggggttggacttgactccttaaactccacactctaagctaatggttctagaagtatgattccaggaccagcagcttcagcatcacctgggaacttgctagaaaggcaaattctggagacccaggctggatctaatcaatcagaagctttcagaggcagaggctcaatgatctgcattttaataagctctccaggtggtgctgaggattgtctgagtttgagtaccaccgctctcagcaagttggccatatacaggttcagactcatgctggggtctgtggttttaacggtgcatttagtaatgtcctatgcttagtgcctgatacctaagaaacctggtgataaaatgttcggttcttatcaacaacattgactcaggtctaattcccacacgtttgatcactgcttaatgtctcctcttcccagctaagggaggagtatagagagcagggtttcagccatatggggcaaagaggaagactccagattccactgttatttatggccatggctgttctcttagcagaccgtaagaatccacaacacatgcactaagaacagccagaaacattgaaagcactcaaatactttttgactgattaatattatgtatctttgttgtctgagctacggtgttcacattagagataatacaaattattatttatgaaggataatttttagtggagtgcttactaagtgctgggcattgtgctaaatgagataataacttgcattatttcatttattcattatgtcagaaccttaagatagtggaattactttatttttcagacaaggaaatggaagctcaaagatactagcatcaccatggaactagcaggtttgagtgccagtgttggacagcaggcaatgactccatattccacactctaaaccacctccccatactgcccctagaaggcaagaggcaccactcaatcaataaacgtttattgagcattcactgtatgaagttgctgaatgttagattaaacaaaatgataaaagcttggataagatggaggatgaccaaactcaaatgtggatgtttatgggatgtcccctcatcaggagtcaactgtgctcttctttatttttgatattattattgtttttaagagacagggtcccattctgtcactcaggctggagtacagcggcacaatcatcattaacagcagcttcaacctccatggtcaagcaatcctcctgcctcagcctcccagatagataggactacaggtgtacaccaccatgtccagctatttttttttttttttgagagagagtctcactctcttgcccaagctggagtgcagtggcatgatcttggctcactgcagcttctgcctcccaggttcaagaaattctcctgcttcagcctcccaagtagttgggactacaggcgcctgccaacacgccctgctaatttttgtatttttagtagagacagggtttcaccatgttggccaggctggtctcaaactcctgacctcaaatgatccacccgcctcggcctcccaaagtgttaggattacaggcgtgagccactgtgcttggcccagctattttttaaaaaatttttttgcagagacagagtctcactatgttgcccaggttggtctcgagctcctgggctcaagtgatcctccagccttggcctcccaaagcactgggattacagaagggttgtgctctttttaatatactgcttagtgtgaaagaggtggtgtctggaagttccgtgtactgaggaacatcattggtgcaggtttcactaagattgacaaacaaagatcagactgtcctctccataaaatttagatctgtctacatggaaagtgggtttttccttcctccgtgccttgtgcattgttctacaaaggccagtcttgcttgagaaggtttagaaaaagaaatgaactgttggctatttcttccctcctcataaccagctctgtcagccttcccatcacacccaaagctttggacacgtaaggatttcattcagcctccaaattcgggctgtgtcgtaagagcccttcctactcaagcccattcccaagtggcctttacactgtggctttggatcatatctgtcaacctttgggaatgttgagcagcaaaaaacaaacaaatgcacaaaatggctttttaggcaaaaaccgaatggacatgaagagtcacgcatgagcactccaccaccttctagagaataaagttctctcacttgccccctaggagacaggaattctaaacttcccgttagttgtttcaatttggcattcattagggactctgtcaatttaaggtttcaatttgctttctttccccccatttctttgagagcccttggagaagaattgggattgaatcagaaggctgtgttgacagcagctgatctcagctgacatcatgaatcatgaaaacagacctccaggctgtcagggagattactgcaacaaagttcaacttcttaaaaaaaaaaaaaaaaaaaaaaaaaaagagagagagagtatctcaaacttttcagtgatttttctttattgcttattttgaggcatgtaaagctgtatgtatgcaaaggtgactgaagtttgggtttacacttagaatcttattaaatccatctgaagtcacttctgtagcagcagttattattaataacaactgtttccttccttccttccttccttctttccttccttccttcctctcgtcctctctctctccctcacttccctccttttcttctacccttctttcttttttctttgcagagacaaatcagaataattcatgttgaactctgtattcaaaggaaccataaacatagaaacttattttttccagctgtcaaaaatagcaaagttactgtttaaagagactaaaattcttccagagactatttaatactttgaagaacagtttaaagactatgaagtaatttcagagattttccagtgtgatattgagcaactttcttcatggagttaatttttattcatgacagtcaaaggtgaagtatctcagggcattcagcctgcagtgttgagatggaatctacttgtggcattcacgccttgtatattaatgaaatcattttttatttctttcatcttgtcatgcattcctatagcttgatactctgaggaatgtttgaaccatctccaatgtatatcacttagctattcaaaaatctagcaaaagtgtttggtggtcagttcacatttctttgaagggaatgttaatgtattttgatggcaatataattcaaacacaattgacatttaaaagaaaaagaattgggctgaaaatttaatatatggtgactatatctgcaatattgtttatcagaccagtctcatgaaaacaaatccaagaatgggatctactgaaaatttctaggatcaacaaaggtaatggatctgagcttagtattttaccacaatgctcacttgaaatggaattggactagtcaggcaaaattccccagccaaggtaaattttgttttagtgacaaatatatttagaaaacctatgtgcaagctttaagtaagccatatattaattttcttctcctttcccttattgtcattttaggtaagtgcaacagctcaatgcatcaaaatggtacttccatagaacacattactaaagaaatcacaacaatggagcatgtggttgttctaccttcgtatcctttctgagaataccagctgcagaagcacaggaagcagcaattacacatgagtcaaagggtgagctttagaacaacaaaatgacaacaaaacaacaaactgagttggaattctggctctcccgcttaccagctcccggaccgtggaaaaatcccataaatactcactagtctctgtgtccttatgtccatcatggggcagagagagcacttgtttcctagagttctctattaataaatgagatactgcgtgcaaagtgcctagcagacaataaataaacggtagctctcattgttgttactgccgataactgaaaagtgctgaacgactacagagaccctcttagggtagaaaggaatgcaagtcattggtagggacaggaattgaccaaattaatgcttccttcagaaatctttccttaaagagcaaatcagtattaacattttaatgctcagagaagaatttcatatggaagactttcggttttctgttttgtaactaccgtcacagaccaccctctttccacctccaatagtacatttcaacagattttgttagacttactagattgaatgtaattaatttaaaaaaccctctgatttcatggctgcctcctcatttggacttttaatttacccattattaaagctcacagtatttctctaagcctgagaacattattccaacaaagattttcttacaaatctaatggtccaaagaaagatatgaggaggagtaaatgaaataaggtaggtgaaaatagtttggaggaggaaagcattttcaagtgtaaggtgttattaatattgacgaagtataaaactgtatctagatctaccacctttctggtttcatttgcctacctgctttgtggacacatgaatgcagtattctacccactcactttataaaaatacaccagcacttcaaatattcaatttcttgacatacagctgaattaatatgtataagaatcttttcctatttagggcatgacagatgtcttagatattcctcgcaattgtttaaaatcctgcaggagcccgcaggatttctgtgaagtgctacatctctatgtgttgaatgcactgttaggacttacatgattctgttttcctttccctaaaatatagttattttaaaaatgatacttttcctatttttatttatttatttaagacggagtctcgctctgtcgcccaggctggagtgcagtggcgcgatctcagctcactgcaagctctgcctcccggattcacgccattctcctgcctcagcctcctgagtagctgggactacaggcgcccgccaccatgcccggctagttttttgtatttttagtagagacagggtttcaccgtgttagccaggatggtctcgatctcctgacctcgtaatccacccgcctcggcctcccaaagtgctgggattacaggcgtgagccaccgcgcctggcctctatttttatttttatgagcagtaaatttctagagagaaaaagatctctagctggatgcagtggctcatgcctataatcccagcactttgggagtccgaggcgggtggatcacctgagatcaggagtttgagaccagcctggccaatatggtgaaaccctgtctcttctaaaaacacaaaattagccaggtgtgttggcatacgcttgtaatcccagctactcgggaggctgagacaggagactcacttgaactcgggaggcagaggttgcagcgggcagagattgtgccattgcactccagcctgggggacaaagcgagactgtctcaaaaagaaaaaaaaaagaaaaaggagggaaatgcaaaggatagaaagcagaaaatcaatgatttggtgaatcaaagcataggttttgcagctgagttctctcttccattaaatcaattatttaaacaaatcgatattttgctaacaatatccaaaatttgtctgaaacgtttatttatttggctcaacatccccaaccgctcaaaaaacccttagcgatgggccagatgttgtctctattttcaagctgttagggcaggttttttctttcctgcataaatccgaagactttgaatcagtttggaagctatgaacatgttactaaaaagtatttcctaagaatgattgctagagccaacttccagaaatctacccaatggggacattaacacatgtgcatagaagtaagtgtgtgaggatcttcatacaggcttgcgaagcagctgaaataacgtgggtgagacacttggtgtgtgctcactgaatatgaggatagagttaaaactaaatgtctgttttattctccgccgggggagactgcacctgtttacgctcactgttgtatcccttgtgcctggaacatagtggacactcaataattatttgttgaaaaagtgaatgcatgaaatgcaaaaagttgaaaacataccacatgtccatccattgagcaatggttaacctgagtatgataaatccagacaatatgattcaaataagttgttctaaagaatcaggcggttctctatcagggattgcaaactcaaatacccacagggaaagggccggtaacataaatgagtgagctagactgggtgtggcaatagggagtggtagggactttagtaagctggaaaactcttcatttgtttatttgaattaatcacagtataaatatagtgttgtaatgaaggcaaaacagaaaaaaagacgataattagaatacctggaattttaaagtaaattccaacaatcaggatttaaattttgcaaagataatgttcgtgttcccaggccttttcgtgggcaactggtaataagaacaatggacagcatggaatccaattctaagaatccattggggattgctggggaaaagtgtgtcctcacctaccttcatccctatcctatagcgaattgattccaaaggacgcttttcttttcaatttgtttccctcagaatttagacttacccattttctactgccaaaaacttttcccaaacagcatctaacagatagctctgggggataaatttaagtaatatgagacctcattagaatttaagaatttgttttagatggatgctgtgagtggtttagaggtttttttttttttcatgctttctttggagtttcttgtacttttccctgttttaaatgaaggagcttcatgttggttatttggaagagaccatcattctatttactgttttttttttctgtacctctcaattccatccagaaatggaaaagctgatcactctcaatattatgatgagatatttggggatcccatttgtaagttagatgagttgccggaaacaggccaaatgttcttttctttcctggcatcatgtaaaaattggttttaaaaaaaatctcaagtcttaatctccattttcactgccaaattgcagatcaaatggccaatgagatagatggggttttggccatatgggccgcccacaactgattctacactttttactccatgagaatataacaggaaaagaaaatgattcctgtcaacaatttctaacataattatttctaatatgcctcagttcccattggcaagggttttgttttgttttgttttgtgggctagatagaattccttaacaggttgagcctgtgaaattagagagttgctttctcaaaggattaaactccaaatactcctgaaaataaagtcacactataatgaaattcttgtttttcattaaaagagaattaaactaatgaccttttacatgcatttttgttttttgttctccaactgatttaggttttgttgcattatattatttaagctcctggctgtttagtcatttaatgtgcattgctttttataaacagtaaatatatctatcacattctttctattctacacaaattaaaagcatggctaattcatcaactaagttatatatttcactattggaatattatgttgtcatttccttatttaatttatctataagctagttttgtccaaatttgtgtcactcacgtcaccttcagaatttttgccatatctttatataacttggactatttgatacataatccttaaaatgcctgatattctttatgtaaacaaatgtaattcaaagaaaacctcatatcattaccataataagaaaagcagtatcattgaccaccaagagaaggaaactttaaaaataaataatagtaagcaataatagtaacttccagttagatgctgttgtatgccaaaatttggacgcaaccacaattaaaaggccgaaaaaaagaaatagatgttggcgtggaggtggtgaaaacggaacacttttacactgtaggtgggaatgtgaactagtacaaccactatagaaaacagtgtggagattccttaaaaaactaaaagtagatccactattcgatccagcaatcccactactgggtatctacccaaaggaaaataagtcattatctgaaaaagacacctgcacacacaggtttattgcagcacaattcacaattgcaaagatatggaaccaacctaagtgcccatcaaccaatgagtggataaagaaaatgtggcttatgtacaccatggaatactactcagccagaaaaaggaatgaaataatgtcttttgcagcaacttggatagagctggaggccattattctaagtgaagtaactcaggaatggaaaaccaaatactgtatgttctcactcataattgggggctaagctacgaggatgcaaaagcataaaaaatgatataatggactttggggactcaggggagaaggttgggagaagggtgagggataaaagactgcatactggctgtagtgcacactgctcgggtgacaggtgcactaaagtctcagaaatcacactaaagaactaatccatgtaatctcaaatcacttgtatgctcacaactattgaaataaaaaaaattccaacccaagggcacctctttttttgttaaaaagtgttagcaggcattaaagaagggttaaagaatattagcaataaactgagactttctgtatgattgaatcagaaggaagaaagggaattttctcactatgcaatccatattccattcacattccatacacaccagctacaattatgtctcctactacctgtggcatgagcccattgttcccagaagccgctctaggtatcttaggtttcctatactggaagtaaggggcttaccatttgtctgagaaacgccatcagagaggttcttggtttgctttcttctcttttgagtttcgcttctgtgggttcaggtgcagcatctccttcgttgaggtccactgtttgtaaggctgattctacttccttggactttataatctctactggtgactcacacaccacctggattattttgccaggtaataagaaaatgaaaaacaaaacattcccccaaaacatgttttacaaagtggggtccttgttgcccccctgtccacatagtagctacagttttgaatctatgaccatttctacacaggcacatcttggagaagtaatgcttatgttgtacaacgcaccaatttccaagctcaactgccacattgacatggaagtggcaaaatcccttccccaaggggaagaacagataagaggtcctttttggggactgtcattcagagcatgctcaatacccaatcaaatctagtaagcccacctctttaatctgccacgtaggtgaattacatttggcctgtctagaaaccaggaataatcattttcttaagagtccaacgttagagacggtaaccatgacagcttccagttctctttccagttcccctgcaactataaagaaactgtcctctttgtagaaaggagagtgtaaaaaccactgaatttaattgacttcctcattaagcgatatctaatttttccctagaacagtcatttgccatttcacttaattgaagtttatgctttcagaagaaaaatgaacttggcaagaaactgatggctaagttgttcgcggccctggccactgtacctagtgagctcgatttcctctgcctctgagtgtctgtggcggcttggatggaagggcccatctaccacactctgctctcaacttgtgttcttttgcagtgcctcactccatttgtacagggccccagtcacatctgggacagtttctgcatttgtgttgttccctgccacaggacagagtgaattggccaggagaggttttttaatttcctttgtttcctcaggcaggggctggcaaaatactaccaaatccagctcagtaactgtttctgtgtggctcctgggctaaggatagtctttaccttttaattttatttatttatttaagaaatgaggtcgtgctacgttgcccatgctggctttcaactcctgggctcgagtgatcctcctaccttggcctgccacgtagctgagactatcagcacacgcgaccacgcctgatggattttacgcatttaaagcgttggaagaaatattttaaaagataaaatgtatgggatggagaccacaaatggcctatgaagcctgaaatatttactatctggccctttaaaccacatggctttcatctgctgcctccctggaaagtaccatagagtcaaaggcatcttcccacttgtctttgctgggccagacccctagcttcttggagccttgttcttggtgtcagggggtaggggaaggggacttagttatttccaaaaatatcgtctgctgagaaactattttctttcccatcatacagaacataccattggtttgcaaaatgacccgaattttccaaatcgagaagaacccttagtctctgtattgccatttgattcagggagttgcccatcagtaaatcagcatgcagaacaccccaacatttggcaactaaatcacatttcttaagctaaattaaatttcttaagctactgacacaatttctagtattttcttttttgtaaacaaaaacggaagttggggggttacaaactcaaaagtcctcaggaggcaaggcagagaatatcagcatggattgaccagacctaagaccaaaagtagtgacagggatgatgacaaagtaaagtcaagctgtcccatctaaagatgttaaatgattaaaaatgctggattggccaaacaaaacctatttgtgaggaagggtctgctgctgggctgttggctttggaccccaatctatctttaggaaacgaggtggagactggagccatatcagagactgagaatggcaatagagcatggacatggatttccacattttgaactgatttaattcaatcgcatttccgaaaagtaagtgtgagccacaagagcccttcaggtgaggctgaaatataggcaatctaactcgtggtcatagaggacaagctccagaacaacttgctgggctctaaatcacatctatatccctcatctaagctcagtgcccaacatctctgtgcttttcgtgttctctgttctcggtgggaattgcatacacatcagaaagttgtctgcatattaaatcaggcaatacatgtcaagttcttagcaccatgcactcaattaatgctagtggttgttatttgtgttaatgttagagctatttagtccatgagcatgaattatctggattaggcaccatgcacatatccaatatttagagatgattatattaatagctacttcttgctatgcctggtattgtaccgggtgtttaatatttttttataaatagcatcaagatagttcgacagcttaggaaatataacattatccctattctatagataaagagtgaacaattgaatgatttggccagagtcttaccacagataaataggcattacaataaggatggcattttctgcggcaactcaatgtatctaatagtggcttaaccaatgaaaacatggaacaagaagttctggggttggttgagtggctccacaatatctctaacaactttggctctttgttcttggctccactattcttggcatgctagattttcatcattttatttgttacctcatggttaaaaaatagctgccacaattccagatatcacatcctcaatccaatgttctgagaaggaaggtcacagccaaagacttgcaccaaataaacatctgtattttgatcccctacctcagggtacctaaatttcatgggtcagagctaggccacttacccccaggctacttactagtgaagaaaatgagattactaacttagactaatcatgatcaaatactttgggggtataaagttggcaactttgcctaaaactaagggtagaagagtggagaaatagaaaatagctcttaagtagataaggaatagagtttgcgttcagaagtattctgtctttgaggcagtgagttctttcttcgtgtgcaaagacctggaggaaaaattactcataaataaaatgatcagattgtatggcaataactctgtaaatcaattctatttggatgccagtggttcccttgctgagcctttccaaatgttgagaggtatcaacccataaatcctaggccacaagtccattctccagaacacaactattgcagtaggtaaaaaaatatagtacttctggagacttccactacctttgaagtcaggccaagaagctggcttttagtagccaaggaaaatccactgacatccagtgtggaaatccagaacaatcttggctaaataaggatctgatttgcatatacagacataggaattcaatttttatttggataattttccaaatttctcctaggccagggctttggaaaaagttgtttcctatttagaacatatgaccgcatctgcacattttaattttggatatcatgaatggacataattaaagtcagatgtgcgctacattttagaattaaatcccccctgcttgatttctgtagaggatatggtagacattgcatgaagatggcaggtacatctaacattgacaatatacatttcagtgaagagtttccctttttgcctcaaattttataccacacttattcttgaaatttggttatacagtttttactagagctgtggcttttggaaattgatttatggcaaatagatttcgtccatttaaacttcatgcacaacgtcatattaacattaaaggtttttattttagaatattttaaagattattttgataggacttttaatgtgattgattacaaagacctcccacagatttttttttttctactcagtaactattctctctcatctgcttacacactctaattttgctttgggagagcaatctttcccatcttcaagactatgtaatttggattaagccaattaaaaaggtctaaaccaatcaacatggtcaagctccttgactgtggttggtttagaaatgacagcatgcggcaaattgtattatttctccaattatttaccctaccttcctgtaaatgaattacacacctgtgcccattgatgtgtgacttgctttagtaatggaacatgggtagaaatgacatataccatgcctgagcagaagctttaggatccgttgcatgattcacccatgccactattttctctctgcaacaagaactgcatgtccttattgaagggactgctgcttctctactgacctcagcaggaagaggccacatgggttagccaaagccaactgatagctggcttgtagcatgagtgagaaaagaaaaaataaaacaaacttctttgctattgagaagcactgtaatttgggacctggttgtcactgcaacacaacctggcaaaagctgacgaatacagcatgtgaatgcatttcagtcagtgaaacagaacaaactccaggacatgcagggttgctacttgacaaatagctcatttactttggactgagtgatgtgatgttggaaagctgagcatgtagccaggccaagaaggctgaacccaaggagagccctgaattaaattttatttgaaagcaatttaactttctagtaatgagagccagtaaaggccactttctttctaatccaggttgaattgggttttctttcacttgcaactgagagattacttattaagagagataaacaacagaagtacctgtttccatggtcttacaggttattggaaggaaagaaatttttttcattagaacattaactcaattaaccaatgggcaaaatattttttttattacaactgaaagattctatcatttcaagagttaaaaaaagatttatttctgataggaccagaagcacattctaggaaaagcactaaacttccacaggcttcaaaatccttatttttctttctgtgagaaactttgagaaatgttgacatcactctgttttttagttttttttaaatacaagtgggccttgcatccgttgatagattagttctggaaagttgtaggtagagaaattttaaagaataaactcaaccacattttagccagaagtcgttatttaaagcactcttgtaatatggttaatcatatctaattgtcctgttgtgaaggtgtagagcactatacattgttttgactaatgccttctctcttatttaagagaggaggaaattaaagctaactctgttttacacattccttcaatccacatggacactgagtcagctgtgagctgtatcatttcactaggaaagaaaatcaccgattactgggacatgctcactcactatgttgtctcttatttgctaatttgctaacaattactgcagaaggtggcaaacttttcctgcaaagtccctgccaatcagtgtttctgttgaaactactcaactctgttgcctagcaacaaagcagccatagatgatatgtaaaggaattagcatggctgtgttctaataaaactttatttctggacactgaatttgaattttgaattcacatcataaaatattctttttaaattttttttcaaccattcaagaatgtaaaaatcatttttagcttgtgggctgtatttggcccatgagctacagtttgctgatccctaaaattattgagttcctcctacatttcaggcactgaagtaagcacgttatagacatgatctccaattttcacaagaacccgaaagtgtaggtgatattattatcgccatttaacagatgagtaaactgaggctcaagaggtgtggcctgaagatgatgggatcaacgtcacaaccatcagtctcattccctccaagtgataggctgtcagaagatgaaatactgatgctgggagtggtggctcacgcctgtaatcccagcactttgagaggccaaggtgggcggatcacttgaggtcaggagtttgagaccagcctggccaagatggtgaaaccctgtgtctactaaaaatacaaaaattagccaggcatggtggcgcatgcctgtaatcccagctacttgggaggctgaggcaggagaatcacttgaacctgggtgggtggaggttgcagtgagccgagattgcgccactgcactccagcctgggtgaaaagagcaaaactctgtctcaagaaaacaaacaaacacacaaacagaaaaaaagaagatgaaatattgagccttaaaaatcaaaatgttgcttgcagtgttaagtcatttaaggcaatttttataatgcttctttattttatttaacaaatattttaccttattttatgtccctatcatcagtttttgtgttatcgtttggtgtcgataatttaacttttaattcctgtttatatttctatttaaaatttcacagtagaaaatagaatatctcctgtttgcctgttagagatcaactctgcattttagcatctgagctgcgggaaacacagggttccttaaacaagcaactacacacaaacatccaaaaagtttttctttagaaaactcagaacctcaaagctaacagatgctacagattttacgggcagcttttaaacttaaagttcgtagaaagaagtcttgtggagtcctccttgtaggttgcgggaatagaaactttgactttctataaaatagtaattcatgagaactttctggaatgatgagagacctgagctttgctgggctaagattggctcaagaaagaaaagaaggaaggaaggaaggaggaaggaaggaagggcagtaaaaccaacaaacagattttgagaggtgaagccagctggatgtcctgggtcgagtggagacttggagaacttttctgtctagctagagaattgtaaatgtaccaatcagcactctgtaaaaatgcaccaatcagtgctctgtgtctagctaaaggattgtaaatgcaccagtcagcactttgtgtctagcttaaggatgtaaatgcaccaatcagcactctgtaaaaacacaccaatcagtgctctgtgtctagcaaaaggattgtaaatgcaccaatcagcactctgtaaaatggaccaatcagcactctgtaaaatggaccaattagcaggatgtgggcggggtcaaataacggagtaaaagctggccaccccagccagcagccacaacccgcttgggtccccttccacgctgtggaagctttgttctttccctcttcacaataaatcttgctgctgctcactctttgggtctgtgccacctttaagagctgtaacactcactgcgaaggtctgtggcttctttcttgaagtcagcgagaccaagaacccaccggaaggaaccaactccggacacaatttcaagatttttcttccaataagaatcataacacagccattctaatttttattccacatcacagacaacatttcagaaacgtgtttggatgtttaacatctgttcagttcccataactaaataaaaataaaaacacacgccctatttatggcaagtaaataagggacacccagaacaagttttgctttggcaacatgataatgttcggtttctatctcaaggagctgtgaattcacttatccctacttataaaaatttcccaaagactgcgcacttctttcaaggcagagagctgttgttttgggtctgaaactcacgaggtcaatttattaatctccctggaagctacgtttttgtgatgttttatatagcaccatccctttcggggatgaatgaactgtcttgaaaattttgacaattcctctagaagattaaaagccaggaaaactgtgaggctcaacgtctctatctcagaggtagacccgtcaagtcagcgctctaacctgagaccgacattctcagcgtctgttgctgcaagatgttctcatgcctgatgcaactccctgccctgggtaccgcccaaagttagtaagaagctggatcaccatggaaataagagtgaacgagcagtcaaggtggaatgaagcagaaggcggagcatcattatccctcaaggaagcgcaaagctgttcttacgtgtagtagactctttcagcccctactgataacaattataaaaatttgtgccctgattttgcatttattttgcactgattcaatgagagttacaaaaattcatccaatgttatcctccatgcgtccctaatcacatacgggataagagagtctacaacaaacgaatcacactggcagcatgcaagaacacaggaccccagagctgaaaatgcccaattgtacaacatggcggaagatgagaatggaatgattctgccgtggtgtgtgtaacttacattctcctccgcacctgtggggactgagtcctctttaactgactaaaggaagataaaaacaaaagtgagagttaaaaggttacagaaaacaaaattgttacataaaagcaaagggttagttgggctcacagtcttggggtgcgttcggggacactgaattgcctaggtacacctccttctaaaaagaaaggagacttacaaaaatgaaaacggtatatatatatatatatagttatgtattttaaaatgcaacaaagagaaaattaaaacacagatgcagccaggatacaaatggagcaagcagaagcgttgtcacagaaaatgctaactgctgtaggtaagcaatgtacttgcctttatattttttagtagttgatgaaaagagagaaatgcaattaatcattcaatacagagtcactgttaggtaaaacaaagaagctactcaggaaaattctggtaataagtgcagagaaactcgttcaattgtccttttgagcaagcaggctttataatacaataggcagggtccaagccctaccctgaccatagcacaggggccagcagcaggggccgctgctttcgtcagccctcagtctaggccaagttcattaggtcaaagttcaatttgactaaaacatgtctgtggaaggctagagagctgcagtcctacatatccacattcaaacaccgttttactcccaggagtaattctggcatatacagtcctgccccaagtgggataggagttatcccgattctgtcaaaggtcaaagccacaatcattctatcagttagccaactttggagttcatttttgcatctttcttttggtggttcttaaacttctggatggatggtggtggatgttacagaccactttgagactcatttgatagatctggactctcctcccagagaaatgcacataaacaatatactttgcaaataatttcaggattcatagaccttctatgtctctcctcttggattacaagttaagaactctgtctatatccattttgttactaagtcctatttttttttttcctttaaggcatccaggggaggggaagacaggaagtgatatttacaaatgtatcttctgcactaggcatcttgcgttatatatcatctcacttaaagcaccccaaaatggtaagtattgtgatcctaacttacagagtaagaaatagaagttcagagaggtgaagccacttgttccagttaaacagctagaaagtggtggaaatggttttaatacatttattttacatctaaaagccaaattttcccctgctatgatgacttcaagggtcagaaacacattttttcggcaatcgtgtgaattcctttcttcacatacagaattattctctctagatgagatcttcagattgcataatttatttctagttatcttcttcccacagtgaagtttctctgggcacaaaaatgttcctaaaagagattgctgaatttctgaaagcttctgattatcaggaaattgtaatgtgttcagaagaaattagcagtagtgttactgtattaatccgttttacactgctataaagatatacctgagactgggtaatttataaaggaaagaggcataatggactcacagttccacatggctggggaggactcaggaaacttacaatcatggtggaaggggaaacaggcacatcttacatggtggcaggcaagagagagcgaagggagaagagccccttataaagccatcagatcttgtgaaaactcacttgctatcaagaggacagcatgggggaaacttcccccatgatccaatcacctcctatcaggtccctcctttgacacctggggattatggggattacaatttgagatgagatttgggtggggacacagccaaaccatatcagatactttcttgaaactgcacccctttttctctgagattagtcagacactggttaataccatgaacacgtaatgaaccaaatggtatctttaaagccagacctcctcaaggccggcccacaaaagtttcaggaatcattatactgtttatattagactgagaaaacccttccattatttaagaacagcacttctaggtttacataccctttttcctgtcccagtttattgcaacaagactagtttttatctttgattgcctgtgtctagaaagtttctggttgttcattgctcactatatttcagaagcaactgggaacttggagtagattccatcaccaatgtagatgatggtgaggaatagaaggggctgcttctgaacagattttttaaatcttcattatggtttcagacctccacatctttctgatgttttaagtctggcattataaatattgtctttttcaaaaggaattgctattttatatttttaaagtcagactacttagcaaagcactcattttgggaaataatccagttgagcatctctcaaacttcaatgattttcataccatgttctaattctttttttaatttatttatttattattattatactttaagttttagggtacatgtgcacaatgtgcaggttagttacatatgtatacatgtgccatgctggtgcgctgcacccactaactcgtcatctagcattaggtatatctcccaatgatatccctcccccctccccccaccccacaacagtccccagagtgtgatgttccccttcctgtgtccatgtgttctcattgttcaattcccacctatgagtgagaatatgcagtgtttggttttttgtggaatactatgcagccataaaaaatgatgagttcacatcctttatagggacatggatgaaattggaaatcatcattctcagtcaactatcgcaagaacaaaaaaccatgttctaattcttgacctgtccatgtaccacctctattcagttgatgtttttctttaaactgactctctttttacttaaatatatttttacttaatatttttttcttaaatatattttaaaagaaatgccttatcattacagcaaatgtcatatcaacatctttgctgtaaatagtagtacgtattaaaaagtacaatagataaaaaacatgcagtaagttctaattgtttttaagtctttctttaaaaaagagatcagcaggtgtttgtacagtaataaatgcctgtgaatatcaagaagagacttcttatagaatgaaaacaggagataaatgcactatgtaaaggattaaatgcttctcagattgtgtccaagagtcactctaaataattttgaactattcttgtacatttgcacactggcctgcaagtgtagccttctgttagtggttgttgaaatatccagttaaaataagaattcaaaaatggataataagagggcaggttctgatccccctttagtgtttgacacatgtaaaagaaaatctgctcagaacccaagtctagagtaccatacactgtggaatcaggtacaaattcagtgtttcagctatgcaatcttgagcaaattaatcacacttctctgcacctcagttcacttacccaaaggctgactgttagactatctactgctcatagcgttgttttaaggaaaaaataaaataaggcctgtgtagggaaaatcatggctgaagcacagctgtgactcactgaagcctggtggctggagtcaaacccacatggttcctcttggtacttacatgaagaccctcatttacatgggagttggagatcctggaaggtatgtttatgggggaggggtaggaacaactcaaaccatgtctggaattagggtacagtggtctataggcttttctacaagccagaatgtattgaagtagagcaaaaataaaggtttcaagaaatggaccctagcaagagaatttaccaggagcaataagaactccagaatcagcaacctccagggcttgtgggaaatagtggttctgggtagggtgctggtggctggtagaacaactcattccagctcagctactctcgaactggctgtctactggggagaaaaagggctgtatggatgcctacagtgggtcttgccaaatggggccactctggggtccaagcagctgcagcgggattctccttccagagctaagcacaacatggaaggaaaaggttttctgcctgctgccttgcaagagacaggtgaactctcgtgggcttgggagtcccaacagcagtgatgagtgggataaattggcacggatcatctccttggtggctgtggtggtggcagtggtgtggcttgggggtgaccacccagtagggacatatggcagcccaggctgattcatgatcacctatcttggattcctagaactatctggatgggatttgtgtgggcatggattcatgtatgttcagcattctatgaaaattgctgatatttattttgtttatgtaaagcacttagcacagtacctgcacatggtatattttcaattagcaacagcaatttttataaatgttgggaagaaatgacactggctagatctactagacctatttagaatttttcttgagtaattctatgttgcttttgaaatgttcttaagtctgcttgggccagatgtatgtttgctacggaaccccttataaacagacatttttaacactgctaactaataggttatattaggttccaaagttggaatggtgtaggggacaatgtgggtctcagttaaaatcttgatgacccaagtaccataacatagtgttatgttgacctttgaaaaccaaaaattctaggtcatactaacttcagcccattgtgccgttattttgagattcatattgtttatattttggactgcactagtgaacccacccagcttgtaaacttgataaatgttcttttaacttggtcgttgtccaagttaactgataaaaattttgaataaacagggctgaggccagattccagagggcttcccgaagacagctccttgcaatatgttttgttccttaataaatattctttgtcggcttgcattcctccagcttcttagcatgcattagatgcaattgcacagagctgaaaaaaatagtaatgctaatagagataatagtgatgacaacccacattatagggccactcttaggctattattgtcaggcagtgggttaagtgctttatgttgtattccaagctagtattcaaatggaaaccaatcttctttaatttctaggtctctattggaacatctaataaactgttgcttttactcaaacatcacatctgcctttggggcttgaggtgtgtctctactctccttgaaagctgactgatgtattatagcgtcctctttgagcatctttgagccaagcctggatctcacatttaacttgtatttgtattaggcatggtttccatgctcatacataaagacaaatgaaggcaacttctcccttctttctgtatgttctctatataacaggaagcctggagctagggagccaggaatatcatttttcaattcattattttctactgccaatgagtatgttgtggtggatgatccacagttgaggtccagcctcattaacagtgacaataaaaaatctagtttaaaatctacgggatcctgtttggacatttatattgctaagaatggggagctaaacagcagataacctatccatagaaactagaataacagagtttcctctcctttaaagagcaaattcaattcttaaggtttctttaaaagactttcatatggtaacacttaagccagcatttgccctgttcctagtgagtcttctaaaagcatcattttgatcatgtgacagctcttctgagtccattaacttcacagtagccctaagacattttctattaagcccagattggtcagcccatctttcaagtgcttccataattgcccagacatatgcccagactttcttaaccagaatccccatgggaaggtgttaaaatctgtatttgaaacaaatcacccaaatgattcagatacgttttttaagttcttaagtctattttgacgtacactgattgctcccttttctaaacaaccgtagcatttgttacctgtactccacagagtaatactaaattgcaaatttcgttgtttcagaatcgggttataattcactgaatatcagtcatttggcgttctttttttttttttttttactcgatcctcccaataaacacgaaagatagatgtcattggccaattttataactgaagaaactgaggctcaagagtttaagtgctccactaaaatttaaacagtcagtaactgtcagaactgagatttgataatgtctctgtggcttcagagtgcacattattttcccactccactctttgtctcccccaaaggaaagcagaaaagggatattttgaagatattccaaatatatcaattattaattacaaatacatgtgcgtgcgtgtgtgtgtgtgtgtgtgtgtatcatgttcctccaaatggatttcaaatcttttgatgctagcaaatgaattttatacttgttttgtacttaggtggtgttaacaccagaagccacacgtgggtgtttagtcatgaccactgattgttcatacttgaagaaatgatgacatcattcactgagcacatactatatattaggtgctttatatgtacaattattggtttcttataacaacactgtgagaaaaacacagtccttattttacagattagaaaggagggtctttgagtggtcaaccaatttgtccagggatacacagctcaacctttctgattctgttgtgtaagccttgccatacacaagaattatcaagactgtgtatcccaatcctcttattcaacaaatgaggaaaagaaactcaaatagtgtaaataacttatgtaaggtcacagagcaagtgagaatccaatttactcagaacaataaatggcatatttactccagttaactgcattttaaacacgtttttggaaagtacaacataatttgaaattggtttccttaaaggtatttttttattttataataataactactctagcaataaagactataaatcaaaacaacttatactttcatatccatagcctgttctgggaaaaattcatttctgctgtctgtaactacaggcttataaactttaaaatcaatatgtttgaaagcttttcaactaaaaatgagagaagaaagagaggttaggttagttatcagtgaaaatataagaaaatgtaagaatttcctagaatttccctttgcatttttcaaaactcttcaaaaatttacaagggtgattttataatcatagtctttgtaatttaacgaaaagaaaacaaaggtcctcattttgctttctgctagaatataagctttcttacaagaatataagctaggaaagggcagacatttgtttactgctactttttcaatgcctagtatttagcacaaactatatagcacaaaacaacttagcacaaataaagtacttagcacaaataaagtaattacaatattgttgaataagtaaaactttgacgaagagccttttcttctgattgggtgcaagaaggagagacacaggggatttggtttttgatttcttttaacttcatatttttaatgatatactaaataaagctaaatagtggctcaaaagacagtgagactgaaataaatgaaattctatcattagggagatgaatgtcaagttgtcctgacattgtttttcaaaggaatagcttgaacttcaaagaagaaccactgtatctcttgtagattccaaacattaaataagcacttgaggcaatagtttagcagctttctcaaactggacagtatagaaagataaagacgtcggcctggttagttcttcagccctcctgagcacggaggaaatagatgagaggtaacactgttcagtgggcacttttgtactaggtccagtgttggaggttttaccatcattatttcacttaatccttacttcatttgtattcatttgtatgacataggtactattatcatttgcatcttacaagtgaggaaacgaaagctcatagagacaaactgagactcaaagtcagagctgtctgatttcaaacttttagcttttacatcagtgtttctcaaactttagccactggcacaccacctatgtggtttttaccatattgtatcatctgtagcagccatggaagtgtgctgctcagattcctgcaagaaagacagccccacctgtcatgccttcagcttctgctcctctccctgggggctcctaccaatgactgggcacgacaggagtactgggccattcattccggtccagtgtgggcctctggaacaggcaatctgtactctatgattctccattggcttggtcaggactttcttagcaccaccttcagtttgaggctttctccacccacttctccttccttctctctctttcttgctagatggtcagaactctctgtagtctgaaggctctctgtacctagctctgccactcctacttctccttcacagatgtcttcctccaataaatctcttgcacgtcaattctgtcttggtgtctgcttcttggaggacccaaatttaccattatttatctactatcagaaccattatttatgtaatactgtctttttattagattcctttttaaacaaaatatgcttatttaaccttgagcaaaacatacgttaatctcaaatttaatgtgctaactctatttttcctaagacaccttgaatatgcatatgaatacatggtaattatttaactaaaattattcagatatgggccacttaagtcttctctcttgtctccaatatacacatatacctcacttggaaattgtttcttctattatattgctggtaaaagatattttaagataagtaatggtgggtgatgaagaaaaaggattacaacagaatgtgtcagctgacatcatccaaagtttttatgaaatagtgaagactgtgttctgggaagaacctggaaggaaggtttctgtatgacaggaagcaaacaggcaaggggccccgcatccagctggattctggacgacggagtaaagctgacaccacagtggcatctgcattcatcatctgctttgcatggtgtgccaagtgcgatagatgttttgatgaaattctgaagttagatttttccagctctatgaattccacccacaccctcatctccaacttcttgctcatcttttggccaaatttaaaacagacaaaagctctgcacatgtgtagcagctggggcttgctcagcaatgataattaaggaatagatctagaataactcagccccactctccctgtccttgcaccactcagacctcagatgggaacaaaatcagacagtggtttgacttttcctgtcatagagcacagtgtttgcctaccctggtggtgaactgatggacaccctaggtttctaaaaggatagtggagacctagtggctgataatgaatgattctgtctggctggggaggagtgaagacagacagcccctaggtagttcatcttgccagagtaagagtgctcaaagagaccaggaagaagtcagggttttaaaccatttcagaaggaaaatgaaatcatgaaataccacaaccctctgtcatgaaatgaagtcactcaaagaatgaaaaattctacttgttcatttccttttcttccccacgaaacacatgtttataacatgacaggcgtttcatttttcctaggaacacattagaaggcttctactcaatgggaagccgagtcattttgaagaagaagaaacaccttccatacattgttgagtacaacagttagcccaatagaaataagttctggagtcatccccgcccggacgactctctaacgcttgaaaatcagacttacctttttccaaaacagtttgcccagaggcagagaggtgggtcctgatttctccttggtgccttccttcgcaggttcaggggttgtcacggactgtgtgtgccccgatgggttgcatcctttggaattcttgccagccccttgggtctcctgggatgtaaagttggctttgtctgacttaaggtcagctgaagtggtgggtgacttttcagcaccctaaagagttaaaaaaaatggagggaaaacattcaaaatggtctcaaaattttaaaaatggaagatctctttttaataaacatgggctgaggttatacataatgttaattttcttctttatatttttctgtattttaaaaatttttactgtgaatgtggacttgtgttaaaatctcagaaaaagttaagatatttttctttcaaaaaataaacatagaagcattattaattatgtttatgtaagtaactcattaggaatcaaggtggtggtaagagaccctttgctgttagaatatggagttcttatttaggccactggtctccaaatggtttcaatcaagttcccatcagtaaaaacattttgaatttccaccttcaatacatgcatacttatttatgtatatattataaacatgcatcatcttactgatcaaaattagaaattaaaggagagttaaattaaatatagaacttctgaaatttttctccatactccactttggggatgactgagttagactataaagttagtaaaaggcaactaggctggaacttggtgaagggattttgaattggaagagtgtccacaaaccctatttcttcacttttaggtgcagccctacactccacaattaaaacttcttgaaatgttatccattcggtctttatttcctctcttcctctctcttccttcccttcttcccttcctccgcctccttccctctgtctttttctctctccctctgtccgtatctcctttctctctttctgtctctctctctgagcagctgcactgaagtccaattccaggacatctgatttcttcagcaagggggtgttaatttctatgctctgccacccactgagtcatgagataaaggaagagttgggagaattatagtcagaatttatcttgacatgagtgaatattggtactcataattttaacatcaggttcatctgacctaacctcttaatcctaaacatcttcattttatgattttttttgctctggatacttatgactcaatccctttaaattcccagggatgtaatatccttgaataaattttctgactaaaagaaaaaatatattgcaataaaaatggggtatgggccgggtgtggtggcccaacacttgtaatcccagcattttgggaggccgacgtgggaagatttcttgaggtcgggagttcaagaccagcctgggcaacatggtgaaaccctatctctacaaataataaaaaattagctgggcatggtggcttgcacctgtggtcccagctacttggaggctgaggcaggaggattgcttgagtccaggaggctgcagtgagccatgatcgtgccactgtactccagcctaggcaacagaacaagacaccatctcaaaaaaaatatagaatatggacaaattcagaaagtttgacagtattttttgatcctggaaagagtcttaaagcccatctgatccaatgcatgaattttcatggatggggaaactgaggccaatgatctgcccaacgctgaacaagggcacaacctggcctcaagtctgaacttctggctcctttctagagctcttcccaggcagcatattgcttctccaaaggatgtttgcaaataacatgaattttactatttgatgcaagacacaacatcttctttgctgaaatttttaatactaagaaggagtcatccattgagcagattctaagttcaagttaagataaagaactgacgtctggaaatgaattttgtgatagttgatactggaatagctccagttccatttaaaagtatacaaaatggcaaaatgttggaatttacaataacctttgcattttatagacagtgaagtcaaaatggctgagctcataagattctgcattacaaacgtcccaaacgctcttgagtacctggtgctattttagctctaaacggtaattaaattaaaggggactggttaaagggtaagtacccctcctcctaacacacacatgctaagtagcttgttttctttttcagaaaataagagaaagtattattcaataattcatttaaaatccactttgagtgtcctctatgagccatgatatgtactaagtgctggggttacatgtcctcaaggagaggatgacagtaaataattccacaaataaatgtaaaatttcaactgtaataagtgctactgagtggggaggcgatttgaggctattcctctcaatcccataaaaagctaaatcaaggagtttgatccactcatgaaaatcagggaagacttcactgagaaaaggatggttgtgctttgatctgaagggtgactgaaaattaaccagagaagggaagaagagagttttccacgcacagggaacaactgccctaaggtccttcggcaagtatcggagcaaagagtggccaagcgtggctacttcaacaacaacctctccttctgctttcctgggagaatctccatttgcccagtggtccattttagaccaagaatccaggggttggggctgacctcatccccatctctaagaaagggctctggttgctttaagccaatcatcaatctgccgaagtcattagaagggcggctccatggccccacgctattttggtgtaacttctgtggcttggctttgtaccttttctaaatgctgtgttatttttctggctcaagggttccctttgatgtgcatttagcccacttactcagagtcacatagaggttacaaaaaacaaggtccccaggtcctggagtgccagaatttacctgggacagctccagtttacctaatgcattacatacttggccgttttcaccgctcagccaccaccctttctctctctgcttagtctccctggaccactgttgcatcttgaagacataatttccaactttaaacttttatttgatgacaagaataaaaggtaacagtgacagacactgttttaagcacctgaatgtcctgacaaaagtcctatgacgaacgattattttttgtattttaaaattgatgaatcatagttttacatattttcggggggtccatgtgatattttgatgcctgtatacaaagtgcaatgattaaaccagggtaactggaatttccatcacctcaaactcttatcctttctttgtgttggaagcttacaatttttctcttctagctgttttgaaatatccaataaattactgttagctgtaatttcccaatggtactatcaaatgctacaacttacaggaagacactaatttttatgccaatttcacagacagggaaatttagttgcttggtggctaagtaacttgcccacagttacactaatgagggggcagagctgacagctgaatccagggagtctgatccccaaacccaagcattaatagtgactccatactacactgtttccaatgaatcaaggtttcctgctccctgggctattccacccatcagtgagggaaatctataccaccgttctcaacaagggcaatatacaacaaaaaataatattgcatttgttcttgggagaagggttatgccaaattagatattaacatggtctgtgtctcccctaaagaattacagtgcattaacaggtataaagaatatttgttacattaaaatttcgtggagggaagggtgattagggcaaaaaatagtctaaaaaagtatcatggtgagggctgatactgagataaagattgggaaacacatctatactgatcagtttcatagggaagtgaccaatttttttttctctttgcattgggaggatatccagaaacccttcaaaaacattacaagggcatgaccctactacagttatagtaactatataattctaatttatttgtgtagttgtttgttgaatatgtatctcttttgctagagtcttggtcatcatcatatcctaagaccaagaaagtcttggtcatgattacgtccccaattcccatcaggcctagcttctggcacaaaatagacaatcagtcattcaattaataattacagtctatgacagggaccagagacagacacccacacaagatcctgtcatgccatatttccagccacccacccctgctcactgggttgtagaataccagtcagaacaccattagtcttttcattcctgcccaccactctcctgccttcccaaagaagtcccccagatggagttctgccagcatcaaccaactggatattctttgtttgcgttacagaggagactacaaaaattttaattgtgttttcagaggcaatctcatgaatagggttgccagatttagcacatgagaataagaatatgagatattccattaaatattaatttaagatcagcaaagaataattttctagcataagcatgtcccaaatattgcatgggacatacttatatttaaattaaaaagttatttcttgtttatcaaaaatttgaatttaactgagtcctgtatattttacctggtggccctgcccatgaaattctagtggattcaatttggagattgtatgtcaaatgaccttaccttcttaataaattttcgtcttgttttcacattgggtgtgggagagaggagatgttagtaagatgtaaacactacaccaagaaccaaaaacaatgaatgaatggtagagcttataaatcatgcatgctgcttgctaatacttcagctgccttacagaaagggtgggcactggggaaacctgaggagagaggggagcattttggggcatggcaaaggcattctaaaggaatgctctgttttgtgtctaaagttgtcaccaaacagtggtggccacatgaaaaagtttgattctgagacatcacatgccattaggccgagaaaaatggttccaattcagcaaaagctgacactaaatgtatttcacttactgatttcagacttccctactttttgaactgagaaaattctttttataagaaggatcatagagatgtagagaaataaagccccagaattaaccagaattggtaactttttttttaatagcaaaatagttttatccttcaatttgcttgaatttctcgttttcttttccaggtgacaaacccatggggaaatggagagtatcacacctcctaaaatcatgataatgtcactgagagaatctggctggttatttaaaggccctactttcctatctttagagacaacagaaataatcaaaagagaaaaagaaatgaactatctcaggtgcagaggtaaaagccaatgagctctaacaaactgctgcgtaaataagaattcagaacatttgggaggtgtcccttactttgatttacacttacataaaaaaatacactgaatgccactcaaggcaaaaccctgaagtccttgtgtctgtgttacagaattccagaaggctgttcccgcggcctcttcccactcttccagaatcctgtcttttccccatctacctcagtgacaagatgggaggccaacagtttttgggaagccctaggaatgataacattgaacttgggtggtccctttattggtggcaagagatactgcagacgtaaaattttgtagtgcatgaagtgaatgtcataatgaaaggcagatctggggaaacatcatacacttcttaaactttcaaggccccttacttacaaaagctccaagtgggagttaaactagattctttcctatgagatctatgacgcgtttcaccagcagttactaagttatttcccagcagttactaagttatgtgatgttggagcacattttaatcttccctcccccgttgcaatatttatcattccccattcttttctcttcacagaacaaaattatcctgtatggaaattgaaaggtggcttcataacatagtctgcttacgcaaatacagattcagctgtgagaactttctatggagtgcttatttgcatatacaatcccgggactgtgacatccaggtagggaagtttttttaatacaggcttttgacttggtggaaaatggctgatattttaaacaaattttcaagcatgctaacccaattcagggatcctttaaactgatggtttcagacaaacactggcgtcttcttagacattggaagcataatatttcccaaactgacttcagtgttgtcctaacttcccaaggacatggagctgaaacatgctctgccttcattcattgcttttttccgcctggacttttatttgggttcagtgtaagcttagttaatattggaaatagatgaaacagaccacagaaagataacattattacttgaggttagaagagtatttcccaaaatgtaggaagcataccattggtggatcagagaagattatagattgtgcagaaatatgatattacatagtattcaaatagtgaaaccacttctccttttccaactctcatttaatccttctactaacattctggagaaagtctcagtctggtgatggtacatctttaacatttttctaccattggccaattaatcaccttttaataaagctagaaagagcatcagattcagagcttaatacaaatgaggtagctagaatgtaatgtctttttaattagccaaattaatgcttaccttcctcttaggaaaaattattctgattttctatatatgatataaagtttcttttaaagatacaatttaaatagaaaataggtcaatttcaatgtaaaaatatcaaataatagtacatctaacaaaaatggtgaaggtggtacacaagttattgacatttgggaaatactgggttagaagaatagttccagaaccctggtccgcactaggaagacacctgtttgaaatgtttatgactatggggacttaaaaatcactgaagtttaattcatatcatctttaattctcttttaatgatccccaccacccaaggctctgtttttactggagaggagctgggtgggctcaggatggcacatgtcttgtgaagaccagagttcttgtttttcctcctactttaataagatacagaccttatgcctaaagaattttctaaaggcgagtcctagcctggggctatccaggtgctttttcttggtgcctctagcctggatctcggatgtcttctgaccagcttgtccatcacagacactttctgctttcgatgcctttggggcaacagcagtcacaacctcagaactttgtttttgaacaaaattctttttgttttctgttgttttaaagtgcattaatacgctgtgacaattaactgttggtacaccatcccctcttctaaccacaaaacaccctgtaaatgtttatcttttttaaacttccatattcacaattttagatatacagtgattttcaacagtgacctatttaaatgacccagatgaacacacctcaaagcaagacagaacaaaacaaaactctgtatctccatttgctgaagacaaataacaggagaagataatgcagtctctacttgatagttgtagatatctaaatgctattgctacatggtaaagtaaaaaatacctgcagacaaaatatttctttttcatcctggagtcaaagcaaagactgctgctgaatgtcttttagtctcaaatcgatctcctttgattcactattagaaactttatggaagcaatatcacctgcaaaaatttcaattcacttctagatgggtagacccccgccaggcagagaaaatgtgtagtgtgaaccaatccactgaggcaaagtagagggagatcgaaaccgaaatagcctggctacaaccactcaagattgttggctcaagttacaaatgtcagggactttcgtgtagggaaggtagtgggctgaaaacaatacagacttcaaaagcatgaatccaagaacttcagtagaaaagatatcaaaattgcaaggtatgagaaccaggtttgtagaaaacacatctgtttgtgggtgtcatggacaacctacattcacaaaacccgcttttgagacccagctccactaatgtgaccccacagcttcctgggcaggacggtgagattttatcagctgggtacgttcagttttgaccacattctgggtcagggaggagtcttggtccatgaccagctaaagagaatgagtgcatcaggtcacttgggaagccacacacacattcccatactccactgtttagagccttttacgctatgtggcttcaaacaacgcaagacatagaaccaaaagaaatacgttttgccccaaccattcattgaacttgaccctatgacctcggagcaaatgaataactttataggaaaatgcatgtagatgcttcagatacatatttttttccaatggaagaagaaaattctcgaggaaaccaagaaatacaatacaaatgtagtcatgtcattcaaccaatcttggctgtgatcattgaaatagggatcgctacatttaatcagagctctacagtttgcaaaacaatgccacaccttcattcaaccttggggtccaggacaaagaatttttttgtcccaattttatagacatgaagacttgggttcagacagattaagattgtaccactatcaagtagcagaactggagctgaaatgcaggtcttttgagacaaaatctaggatcctcttttcacagccagctccttcacatgtgggtagcagatgtagggggcaaaccaagccatgtatctgatcccactgtttttcaaagcactttccgatatcagaagaaggacccaagacacttatctgtcaccaagttaaacttccttcatggttcccgtgaaacttaaaccgtgtattccactagaggtaacgagccttgtccagtgtaaagggagaacatctctaggaagatggtatttcaaaccaagtttattttgaggagagtgggctgaattcttggatgacagtgaagaacctaggctctctagcgtgtcctaacgcctctgcatggccatccgtttggcaggtgccccagggaaactattctatttcaccaaaccactgcctttgcagtaaagatttatttagttttcaaattacattgaaaaataacatattttttagaaaacaaaaatatagcagctttcttctactttatttttttagagtccacgtcctactgaaaagctttcttctactttacatggactgttttttactatattccctgggtccctctacgcacaactaaaaagactaagatgatgatataattattagtattctgttcttatgctatataagaaattggtattgtgatattatttagccagagttggcacgtctttcaagctttccagtaaaattttaatttaactactgttaatgtaaataaaatattttaatgacaacctaacagcactattaaattgctaattatatatagatatgatacacacacacacacacacacacacacacatatatgtattcaaaaaacaagcaggcagacacaaatccaaatccaattctatgcgcaaacccaaatatatacatacacacttccaactacctaccgtgtcttctgggtccttttttgtttcagctttgttaggtgaaaccttaaaagtttgagaaagccaaatattagaaatcattgctctttagagtgatttttatttcatagataaataactctttagggtggtccagttcaccatacaggtcaagaataaaatgagaagtatttttagttcaatagaaatctcaggaccgccgggtaatacaaaagttaacaaaattaatatcttataatgagatacatctgatcttatacatttaccaagagtttgaccacattcaaaattgtctcctggaagaccacagacttccaataaattttaccattactccaaacacatgtgcaaccctctggtgtttgtggcacattctgttgacatttattgttttttcttttgaggttagtcttgatatttgaaaatagcccaaacacatttgggacagtctgcttcactatgcattcattcattcaggtttttttttttttgaatgatttctacagtattttatttgccacttgagtggcaaaactgctttgagatgtccacaacacagggagatatttttcaattatttttatgatcaatgaacataagacattcaattgcaatagaattccattacaacacagcccatgttacatgatttgggcatccactgcttataccatggttccgagcttcaggggctctcttgctaaaagtctgatataacacaactttcttatgaagcatatcttgtccctgttctctcccatgctccaacagcaccatgataattcatttagtacaataacattcaaatgtgcattattcttagaattaacaaaacttttgagcaatagagtggaggggaaaagaggagaaaactgcttaccagagttttaaagaaactcatgatggaattattattctctgctatagctgctgcctgggaatcgtcctttgcagtctccagtccttctgggtccccagggacagagcaatccgcagttccaagttcttgtccttctttttccttgccgtcaactatgtcctaggggcaaaacagttgtcacagttgccacttgctgaatgtgaactctcaaagtcatacttttgcttcacacccctttctctcttaccccctaattccagccatacttcttctgcccacaggcgtgcagaacaatcatgagattataagagtcactcttccttccctccccctctttctaacatattcagcatttgctgttggttggagggacattgtttggagccaaagggtaacaaacacagcagtgcacgttgcatttcaaacaaaaacccttttcttccaattctgcaaagaagttgtgtaaggtatcgatattttccatctttatagtctccttatctatgatgtgtacattatccccagagatggcgtttcccacaatttccacagagttggattatatcaactaaaaaaaaaaaaaaaaaaaaagaaaaagaaaaagaaaaagtactggtgtttaaaaataactattttgcttttgagatatgaggttcatctgtgcaaggggtgtgataggggaactgattttctccccgacctcctcaggagggtaggatgcgttctgaatctgccttcctttcaccatctcacctctcacgaccccaggacaggaagctactgcctctccaccttctgactgcaacagccctggccttgtctctggttgggctcttgaccctcacaatacattctttactcaacagatcccatcttcccactccttaccaccctccagtagcttctgacagctcttggagtcaagcccaaactctgatgcaggatctccaacgtctaacatggtctgcccctgcctaaatctccatcctctctgtaccacgtgctccttcattccattttctggcccactttctttgagtttttcaaacataccacaggttatttccaaacttctggctctctgtttgaaacattctgctcctctgtctgcccgtaggtaatttccatccatccttaaggtcataagtgtcatctctttggagagattgtccctaaacattcatctaaggctgtcctcccaccactgtcgtctccaccagagtcccttgcccttttaaaaatctttgctgtgtcagcagttctgtttacttctcagtctttgtgcttttcctcatactcccattagactacaaactcgacaaagacagggataatatctacttcactcagtgcttttctcaagtaccaaggacagcgaggcccacagaaggcattcaataaatatgtatcatttatgaaaattttacaaacatagaatagtgctatctgtaccagcataaattctcatgtgacaaagtagtacagaaacttcccattgcaacacagctaaacctgcctcattctttacgactcaggtgacatttattccattgcttggttataacattgtttattgtctaatatccttattgatggacattcacagtgtgtatagttgtacatctagagtattataagcagtagtaaagtgatcatctcacacttttatttttaaatactcatgtatctatattttctttgggtaaattatcaaaaatgaaatttttgggtcaagaggtatgcaaattatataaacttgatgaatattcttgcaaaaaatgagaaggtttcaacagagaggtcctgcaggtacatcggtgcatctgagaagctgtttggtgcaccggaggttgtgacaagtgagacctaaaacgtatccgggctgggcaggttggtgcatgtggttgtggcctggcagtggggagcttggtctggaggtgggtggagtgagggaggcggactcgactctcacctgctggttgagcatcgtcttcactcttcgccctccctttcatccccgtgtagtccttcctttcatcccagggctgtgggttccgccttctccacaccatctccctgcccccatgctgccagttcccttacttagaggagaatgaaaggagacacttctgtttcctcaaaagcgatttctaacaattcgcagtgtgtgaggtggcagaagcccacagaagacttggtatttctattttgaccccttctctcagtagtggagagtgggatatggtggcactgcatttagactcctggattttatactttctcctctggggttggcagtgtctggacaagcagtataaattgatatgggttgactatcccaaccactgagatacaattcaactcattttaatggacgattgtattgggccattttttgcgttgttataaagacatacctgattctgggtaatttataaagaaaagaggtttcattggctcacagttctgcagcctttacaggaagcatgggactggcatctgcttggcttctgggaggcctcaggaagcttacaatcatggcggaaggagaagtgggagcaggcacagcacatggtcagagcaggagcaagagagaaagagtggagggggtggtgggacaaacttgcaaatgaccatatcatgtgtgaacatagagcaagagctcagttaccaccaaggagatggcccaagccattcatgatggatccacccctgtgatctttcaccaggccaaacctccagcataggggattacaattcaacatgagatttaggtaaggacagatgtgcaaattacgtcaactacttattaagcattacatgtacaccagtgctttctctttcctaagctagtataatttgaacaaggtcgcttaatcttaatatattattatttattatagaataatatacaatgccaatacgtcaaatattttacatttacagcatgcaaaccactatacaaataaatgcattaaacatatgtcacttaatctttacaacaatcttctgagacaaatattacaattaacagtttcaaacaatgaaatgaggctcagagagtttaggttacttgtctaaggtcacacagcttgagagaggccaatatggggattataagtcaggcctgtcagaactgaacatcttaaaattctatagattatttggctatgagtgtcaactttgctaaacttatatagtgtgtgcagtaaaatgtaacatcatataaattaaatccaggtggtggaaaaccaagatcctcatagggagtgtatataaatatagactacatccataaattccaccagtaaaaacccttcataacttaactctcccaaaaagtactgcacttataacttgtttaaaccatgtcatccttacgtcttaaacaatgcttgtttatgcttgtatagctttacagttacgaggtgccttcacaaatctatcttatctaatctttgccaagattgtgcaaggcaaattacagatgagaaaactgaggcccaaagaggtttaaacatcatgtccaaggccacagttggcaagcgtaagcattaatttgtttttgcctaagtagcattcctcactccttgtgacaacaggaccctcctgctcattcctggagaagtgcccctcttccattccattctcattgctttcctgcccgtttttttttgttttattttccccctgggtcactcttttgtaaccccagtgacctgcttgctcttctttgaacatgtcaagtaggctgttgcctcaggacctttgcatctgggctgagcttctgcctgccaggagcatgtgaccttacttctttcaagtctttttcaattgtcacttttttctttttttttgagacagagtctcactctgtcacccaggctggagtgcagtggcatgatcttgactcactgcaacctctgtctccctggctcaagccattttcctgcctcagcctcccaagtagctgggattacagtgtgtgccaccatgcctgtctaatttttgtattttcagtagagatggggtttcaccgtgttggccaggctggtcttgaactcctgacctcaggtaatcccctcacctcggcctcccaaagtgctaggattacaggcatgagccactgcgcctgagccaatggccacgttttcatcgaggtctttctttaccactctactttaagttgctataatatatcccggcatatctgatgctgctaattgctttatttttctcctagtagatttcacttctaatatattactggctcctcttccccctaaggacatctggtaatgtctggagacatttttttgattgtcacgagtagcgggttagtgatttaccactggtatctggaggatagatgccaggcatgctgctaaaattcctgcaatgcccaggacaaagagttatctggctctcagtggcaagactgagaattatattaaaactctcacttgtcattttgtgttttgttcctctcccttcactggaatagaaaccaatgaaggttctttttctcccttatgtttccccagcacccagacttgtgcacatggtacaatctcaaaaattactagtgaatgaatgaacaaatgatttaatccaagtgagagtatcagtcatcaatttttagccattatgatttcaaatattttttcttctctccttttctctcctttcatggactccaattacctgcctactagcctacttgaagttatcctgtagctcattaatgttcctttcttccttctttttgaaaaagccctcttccttttcacccactgccctgtggttccttttggatagtttctattgctgtgtatttaaattcacaatttttttttctgcattgtctaatctgttgttaatgtcatccagtgtattttttacctcacacactgtagtttttatctctagaaatttgatttggattttaaaaatatatcttctatgtctctacttaactttccaaacatatgagacacatttatgctaatcctttttatttttttgccaattctaacacctgtgtcagttctgggtaggttttggttgatttctcttcacatcatgagttacattttcctgcttctttgcttccctggtaatttttgtttgcatgtcagacattgtgaatcttacctgtttgggtggctggatattttttgttcctataaatatttttgaactttgtttttggaggtagttaagatacttaaaatcagtttgatccttttagttctggcttttaagatttgttcgtgaaactgactttgcaaaaattatgagtgaaaaaattatgactgtgaaagagatctgacctaaccaacaccatcttgcctttaacttccaagctgcccttgttcattcctgggggtaggccacactaacttcgggaggaatttagttatagtttaactttgaaacaaagataataacagtcccttccccaaacaagccccctttattcttggggaccagtccacctttgtaaaactagcaaattagacacaacattagaaattatggctcaggagtcatacagccagaggccacaagattcttcacctccccagttgttcttatggataacattactgctgtaaaacctaatattggtgtttgagatatttttcagaccctgcattctggtctggctcatctggacttgcggcccccacccaagaactgactcagtacaagaggacatctctgatgtcctatgattctgcccccaatcaactaatcagcattctccacgccttagcaatctgcccaccaaactgaccttaaaaaactctagcctctgaattttggggggaagctgatttgagtaataaaaaagttctaatctcacatttaattggctctatgtgtagtaaactctttctctattgccattcccctgtcttgataaattggctctgtctgggcagcgggcaaaaataacccattggcagttacattaggtaggaccaaaatcgtgtctagtctaggaagctaatattttctcgctaatgaggaaagaccctgtgactactctacccagtgccttattaataatgaggttttctagtctggctggtgagagaaggcactctctctggccctgtgtaaatgcctttctggtggttggttttttttttttcccccttcagtctttgctagtttcctcatatgaacatattggtcagctctctgcctcatactatgtgaggacctttgacagacccttggagtttgctctctgtgtatctctctctctcctctgatgctttgtctatgaactctggccaccttgggctcagggagcctgctgggctctgcctcagttcctcccccctaggctatgggctggaaaccctctcaaggcagtaggtaggagcagacacagggattatctcttatgtcccgtctctcagagaacacctatccttgttgcctgatatcttaaaacagtcttaaaaattgttgtttggtttttttgtccaagttttcatctgttttaggcaagagggcaaagccagttcctgtaactctcccttagctgaaagcttctactctgttaatagtagagagtgttgacttcctgtagctggctacaggtgagttcgtttttggtgatgcatgaatcttgagctacattatcatgtgaacagcaatgaggatcaaatcaggtctgaaaagaagtgagctccctaaatttgaaattaataagtgtatttgaaatatgaactttgtcaccaaaattaataataaatcttgttctaggggtgtagcagatctttttatattaattagtgataatgattatgaacattatttataaatgaataaatgaagggaagaatgaatgtcaatgatcaatctctctttctttcccatagactgatattcaattgagtaattttgcaaacaagaattgaagctcattatctcttactgctatttgttttcctaattcccctctcatcagtacccatcatactgaatcataattgattaattgccagtatcacctgctcaactgggcatttgaggacaggcactgcgtgtgtctcattcacaacaagatcaagtggttgataaaagttccagtgcctgacaaagactccatattcacctcccagctccactcacaggttgaggaaccccagctggggtcttagcctctctgagacaaggtcgtctcatggaacacaagattaataataaaccttgcctggtataattcgttgtgagtttccataagaaataatgcatgtaaattccttagcataatgcctagtatagaagtgtccaataaatgttagccaaacagacaaaaaaaaaaaaaaaaaaaagcaatgaaaatgccatacaatttgcaaagttcctgacacagagtagattcaggagaaacatttgttaaaggatgaaaggatatggagtaaattcttttttctatgcctttgtacactgtgctctccagcttctgtcttcccttttgaaatctattcttcacgattggaatcaagtctccctctcccaccgacgtttttctgggtcaggccacccatggactctgtccccttctctgaatttctataccacagttctcagcactcagttggtacttagattatgcacttagaccagcctaacaccaaaggccaggttggaatagtttgcattaaaaatggggcttttgtgaaatggctgcaaaaatacaaaaagcacattttggtgagtattttaaaagtaacaataatacacatattctacaagggtttcaatcagccccaggactctttctaaatggaagcatatttcttgtgaaatgcctcatgagcagctgaagcttcataaaactaaaagcaaataaaagccatggtcttaatagtcttgttaggttttctggttaattctgggagaaaagtgttttgctttggaagagatgtactttttaaaaacaggttctaatatgagttgaacttttaaaaactaactctgaggtataactgggatccaagcggttaagctggttgattagaaggatggctgcaaattctatttatagcagatgagtgttgatatacgtatgaggaaggcgattttattttaggtggtatgtccgcgcacacacacagttattcttttaatgtgtattgtggactgaaagtttgtgtctccccaaaattcatgtgttcaaatcctaacttctgatgtgatggtattaggaggtggggccttggggagatgactaggtcatggggtggagcccccatgaataggattagtgctcttataaaagagaccccagcgagcgttctagtcctctttccatcattccagggtgcaatgagaagctggccatctgcaacccagaagagggtcctcacaagaacccaaccatgctggcatcttgatttcagacttatagcctccaaaactgtgagatatcaatttctgttgtttataagccatccagtctatggtactttgatagcagcctgaactaagacaatgtgcactagaaaaatatgtccagcatcaaccttttcatattatggatatttttgtgtaggtgaagttcaatataaagtaaactttaaataaagctattacatgaataactgaacaggtgtcttgaagatgagtcattatgaaagtggcacaagacataaatctagactgagaaattccccacaggcctaagtaaggtgttgcccaggagcaccattcatgaattcatcctcactcagtaactatgtgggggtagttacattacatacaagctgtgcagaggccacacagcattagcatgggctctgaagttatgctttcactgtgtattgtggacttaaagtttgtgtctccccaaatcctaaccctcaatgtgactacatacaagctgtgcagaggccagctgcccaggtccaatccctgctctgccatctacacctctgcagtactgcactttccctaactctaggttgcaatttgctcatttgtaaaagtggggtgatgagtagcacctgccttttagggttgttgagggagtaaatgggataatccatataaaggacttaggagaatgtgcagtacagaggaagcattcagtaatggttagctattattattgtgtttaatttaattactgagcactgtggtaagctgtgagatttacaaaaatgaatctgacactgtcttctctcctagatgcttggagccttatggtggataaaggtcagtagatagggacaagtactctgataaaaagacaagtgaggctaagcacagtggctcacatctgtaatcccagcaatttgggaggtcaatgcaggagaattgcttgaacacaggagttcaagaccagcctgggcaatatagtgagaccttgtctctatgaaacaaagcaaaaacaaaacaaaacaaaacaaaacaaaacagaaattagccaggcatggtggcatgcacctgtggtcctagctacttgggaggctgaggcaggagaattgcttgagccagggaggtcaaggctgcagtgagctatgattgtgccattgcactccagcctgggtgacagagcaagaccctgtctcaagataaaaagaaaaaaaagacaagttaatttcatcagcccagtgggtctcagcataactggattttagaatcacctgggcagctttttaaacaaatgccaatacccagattccaccccgaccaattacattagtctttttggaggcgaggctcagatgtcaatatttttagacctccccaggtgattccagtgtgcaccaaggtcaagagtgactgaactagaagggagagggagacttgaagatgaagcagcatttccccaaggccatggagcataggttgcaagtagactcgcagaaacagggaggaatgcgggatggtgatggagaaatttctgtcaagtggacatggaggaaggcatgtgagaaatgcagaaaaagatgaggtggggatgggtttggggagggtttagggggcaggttattcagttcagcagaggtatgggggttatgaaaagcaagatggttataacaataatttggagtcagactgaggaagtgttgactgacatttaaggagtaggtgccatggaaggtgtttgggctcaggcagcctcactctaccttaccaggatggtgggcacagggcaaaggggctaaacagcagcagaagcagcagagggttccatcacataattttgaagtggagaagtccccacctattccctgaagagaaacatcatgtggatgcccacaacggagaagatatggagagtcagagagaacaatctgcaaggcaaaaagcctagagccctttccccttaacccctcctccctaaactcacatgcactaggggaggacgagaagaggaaaaaaagcaagtcccccttcttccagactgcaaggacctcaggccatggtcaaggcagagcttggttctagcaggaattgggatgaatgttataatgaatgtgtgattaaagttttaaagttggattgggctgggcatggtggctcacgcctgtaatcctagcactttgggagaccgaggcaggcagatcacccgaggtcaggtgttcaagaccagcctggccaacatggtgaaaccccgcctctattaaaaatacaaaaattagctaggcgtggtggtgcatgcctgtaatcccagctacggtggaggctgaggcaggagaattgtttgaacccaggaggtggaggttgcagtgagccaagatcgcaccactgcactccagcctgggcgacagagtgagactccatctcaaaaaaaaaaaaaaaaaagttggattgaacaggacttttgaatcacagcaagtctggggacttgcctacggtgtcatgaaagattaggagagaaatttttgatcaaatatctactgtgtgcttcccactgatggaggcagtgagagtacagctcacagtccttggggagctgaaattctcacaagggaaaaaaccgaagtggacaaaaacacagataaactaatacatctcacagatgactcaggtggtgagggctgctaaggagaaaagaaaaggcaaggccacggagggtgaggtgatgggctgctggctacttagacagtaggcaaggttctctgaagttggcgtggaggcaaggaggtagctcttctgatccccagcctgggtccactgctctgagctactccggtctgacagcccacgtgctccccagtgctcatcacagaaaataaaaggggctatgtctaggttgcccgcagctcctgtcctgattgggtttcctaaagggctgcaaggcaatgattcttttttgtggttccagggctagacatacaggggatatctattgaactttctcaaaacaaaatggaatacagtgatgtcagctgaagggactaggaattactaaaatatcaagtggaccctatggatctaggtggccatcaggatctgccatgatggacgccctctgaatgaggaagaaagctgtgagtacttccgtaacctggagaaagaaccctactggagcagacacagttcaaaagaactccaggaacacaggagcccgctgcctttctgcattgccccatgacatcttctctagcctctctgcttccctgatttcccaactgcagtaatgtctcctgccttggacagacagtagctatggaggagcaagatctgccggcccagggcaaggagtaggtttgcctgtggctcttcctgagtgagagttttatggcctttccaggtgaaattctcagcttgaacttaagcccttactttgaaatattttttttttcttcttagattgacattaaaaaataacataagacttctgcttctgggaagatggggcacacacactttctcctgttcctctcaccaaggacaatgaagaaccctggacattatagagaaaacatacataaaaggattctgaaaggtggagaagagaaggcagaccagctgaggacccgaggaaaaacacgatggtgaattccttgggttttctttttgcctcaagtaccccagacttggagttgaagaaattagcaacctggaaacacctataggctctgacatactcacaaatcctttccgaaagcctactctctctgactaaaggaccaggaaagggcaatctggcaagacagaaaacttttagacaatgaccatactactccagccaaataccacaggacattctgtggtctcaccatctcccatgccagagaaagccaagtggggagcctagacttccactttcacaagaccgtaataggttatcccaatacccctgcaagatggcatctgtggggctaagtagggagctgggattctcatcctcaccggttggtaataagccctccccaccatggtgtccgcggggaccacatggggagcctggacttccaaccccacccaggagcaatgagatgctcctccctctccccactggggtggtgtgagaagagacccagtggagttagcgtcagccagtggtaatgagacctccactgtggtatcagtgaaggtcatgtgagcagaaaactcccgcctccacccagtagtaataaggagtatacccccgccccccaacaatggaggctggtgagaaacctggatgtttgcctccacctgacagtaatgaggtagcagccccagtactgctggaatggtgtccgggacagccagctaaaatagaaagtttaagcaagatgcagtctcataatatgaaaatggtcagatttcaattgaagataacttgtcataccataccaagaactaagaaggcctcaaacataataaaacaaggcaatcaacagatgtcaacctggaaatgagatgacagagatgctagaattatctaacaaagatttttttttttttttgagacggagtcttgctctgtcacccaggctggagtgtaatggcacaatggcacaatcttggctcactgcagcctctgcctaccgggttcaagcaattctcctgcctcagcctcctgagcaactggtattacaggtgtgcaccaccacgcccagctaatttttgcatttttagtagagatgggtttcaccatgttggccaggctggtctcaaattcctaaactcaagtgatctgcccgccttggcctcccaaagttctgggattacaggcgtgagccactgtgcccggcctctgacaaagattttaaagtagtcacaataaaatgcttcaattaacaattgtaacagtgcttgaaacaaatgaaaaaatagaaagccccagcaaagaaatagaagatataaaaataactaaaatggaaattttagaattgaaaggtataataatgaaaacaaaaagcccagtgagtgaaatcaacagcataatgggagagacagagagaagcagcagcaaaaacctctattagtagagacaacagatgacaacaaaaaagagagagcaagagagtcaaggtacagattaccagtatcaggtacaaaactggataggagaatgccataaccaatgctacctacataaatttgataacgggcaaaatggaacatttgctcaaaaaacacaaactattataactgacccaatataatataaatgatttaaatatccatataactattaagaaaattgaattcataatttaaaaacttccaggaaagaagtcttcaggcccagaagacttcactggagaattctatgaaatgtttaaagaagaattacaccaattctacatgaaatctcctagaaaacagaagagggaatgcttactaatttattttataaagatagttaccaaaaacttggtaccagaaacagataaagatggcaccaaagaaatgaaaaataccctactgatcaatatgcctcatgagtatagatgcaaacattctttacaaaatattagcaggtagatttcagcaatatgtcaaaagaagtatacatcataaccaaatgggatttactataggtttgcaagcttgattaatatttgaaagtcaattgatgttatccacaatagtgacagactaaagaagaaaaatcacatgatcacaacagtgaatgcagaaaaagtattcaacaaaattcaatcctccattcatgataaatctctaaggaagacagtaacagagggtgcttcctcaacttgataaagacgatctacaaaataaaaattgagaactaacattatccttaattctgaaagactgaatgcatttctcctaagattaggagcaaggcaaggatgtcagctctcattatttgtattctacatagtagtggaagttctaggaagtatattaaggcaagaaaataaatatagggaatacacattgaaaaggaagaaataaaactgtccccagagaagatggcaaaattagacaatttcattattttcaaaattagaaaatcccaaggaatcaacagaataacacctagaattaataattgagttcagcaaggctgaagaatacaagataaacatgtaaaaatgatctagatttctatatactaggaatgaacccatgggcactgaaattaaaaatacaataccataataatcatacgaaaatgaaatactaaggtttacatctcacaaaacatgtgcaaaacttgtatgctgaaagctatataatgctaatgaaagaaatcataggagacctaaataaatggagagacacacaatgttcatggattggaagactcacatagtaaagatgtcaatctgccccaaattgatatacaggtttaatgcaattcctgtcaaaattccagcacttgtagcaagacattttgtagagatagatgaggttattctaacatttatatggaaagacaaaggatttagaataattttttaaaatataaattgatgaatcagtctatctgatcacaagccttgttatatagctacagtaagcaaggctgtatggtattggtggagacatagacatatagaaccaatggaatagagaagccagaaaagacccacacaagtatgcccagacgacttttgacaaaggtgtaaaagcaattctacagaataaagatagtcttttcaacaaattgtgctagagcaatttgacatctatagaggaaaagaaagaacctcaatttaagtctcacatcttatataaaaattatctcaaaagagatcgtggacttaaacataaaacctcaaatataaaacttttaggaaaaaaataagagaaaatttctgagacctatggttaaaaaaatccataaaagaccaaagaccaaaagcaaaatccataaaaagaaaacataataaattggaattcatcaaaactaaaaaattttgccctgtaaaagatcctgttaaaaagatgaaaagagaaactagagagtgggagaaaatatttgcaaaccacgtatctgacgagagactagtatttagaatacatttaaaagaaaaaaattcttaaaactcaacattaaaaacaaacaaaacaatccaattagaaaatgggcaaaagacgtgagggggcatttcattgcagaggatatgcagatggcaaataagcacataaagatgttcaatctcattaaccattagaaaagtgcaaattaaaaccataacgagacatcactatgcacccatcaaagtggttaaagcaaaaaatagtgactattaaatgctgggaaggatgcaagaaactcgattactcactttacaatgtaatcactttacattgctggtagaaatgtaaagggatacaggcagaatagaaaacagttagacagtttcttaaataattaaacatgcaggcagggcgtggtggcaagtgtctgtaatcccagctactctgggggctgagacgggaagatcacttgaccctgggtggctgagccaagatggcaccactgcacttgcctgggcaacagagcaagatccaatctcaaaaacttaaaataaataaataaataaaacatgcaactatagtgattgcactcctggtcatttctcctagagaaatgaagaattatattcacacaaaaacctatgcattaatgtttatagcaaagttatttacaatagcctcaaagttggaacaaccaaacatcaaactggtacttccacagcatgggatactacttggcagtcgaaaaggaccaatatctaccaagacactcagtgattcggattaatttccagagatttatgctgaaggggaaaaaagcctatgtaaaaaagggtacccactgtatgatactatttagatagcattcttgaaataataaagctatagcaatggagaacagactagtggttgcaggaggtaagaaaaggatgggggtgagagggaagtggatgcacctgaacagtcagtatgcagtatccttgtggggataaaaatgttctctatttgattgtatcattgtcaatatcctggttgtgatattgcactacaggtctgaagatgttaccgttgagtgacgctggataaagggataactgttgtatttcttacagctgcatgtgaatctacaataatttcaaagttaaaaagtaaaaaaaaaaaaaaaaagcttgataggataattctggaagagcaacaatgaagaaccacttaaaaagttgaacttttgggatctgcagttaaataaattcgcatgtggttttaacatgtgaaattaacccataacaatgtgtgatggaatattttgcagccatgaattatttaaggagtgtgtaatgacaaaataagtgtccatgataaccgtaaaaatgatcagcctttatgtgtcaggcccagtgctaagcttgttaaaaagatcccgtttaattcttacaacgatcccatgaagcatgcactgtttgtaattccaattatacagatgaagaaattaatgcacagaaagaataaataacttgcctaaggtcataaagtagagttgggatttgatcccaggcccagctgatttcagaggccaaaggtttttcagtgctgtgctgcactgattctatctcctttccttcagatgtttactcaaatattatcttctcagcaagtcctttcctattttaagttcctgccactttattccttttctctgctgtatatttttctactttgtaaccatcagccatacaacatatgttaccatcaaccatacaacatatgttagcatcaggcatacatgcatacgttgtatggctgatgataacaaggtggtaaaattccaaagacatataggaatttagtatatgataaagatgatacctaaaatctatggaagtgaagaacttttaaataaaagatgtaggaaaaacagagcagccatctggaaaaaaattaacttggtgtcacaactcaaccctctaccaggataaaatccaaatagattaaaaataatacaaggaaacatggaaaacagcttttcattttggattgagaaggcttttgtgtgtatgactagaaatccagaagtcatgaaaaggaagattgaaaagtaaaaaaatccaaatgtttacaaaaacattcattggccaagcttgtgtgaagaaggcaatcatgcattgctgttacaagtataaactaattcaatcctgatggagggcagagtggcattgtgtaccaaaactgtaaaaaggatatattcttttaccctgtatttccatctctaagagttgatgtagaggataaacctaaactcacacgtgtgaaataacaaatgtacaaggttattcattgcagtgaggttaatagcgaaagtctggaagccagccaatgggcattaaatggggtcctggttaaataactcatggtacaaccattcaacagaatactctgcaggcattacaagtgaggaagctccctacagatacagaaagtattgttaactgaaaacaagcgtggaatagaacagagtgcatattatgttaccgtttgtgtaaaaaagaaagaaaaagaatttatgttttatttcttatatatgctcaaaggaaccctagaaagatacattaaaaatacaaacagcaattatctactgggtggcattttataattttttgttttgaacagagtgaatatgttacgtattaaaattaagactaaagcaaaatatgcatgattaactaaaaaaatttaaaaacatcaagagggccaagctaagcacagttgtgatgagagtccagccttcaggccaccagtgtgtggcctgtgctttaaacatgttatttgtaggtgctgctgctattctcatcaggcctccgaatcattctcagcaaacaacattatacggaaacagaaacattctccagaaaatacctggaaactgtttttaagcaaacaggcgtccgtggtgttagcttgtttttcacctctgtgtgagaagtttatatatattttcttttttgttggcttcaaagagcaaacagataggaacactgctaaagtgattacaatttgtcatgttgaaaaataatgccgccttatcataatttgattgtctgtaataaggcccatatggaacttctggcactttctttcaactattgtcagctggacttcagactcctttaagcagatctacattgttaaagtgaaaatataagataaggcttaaaaagccttgtctggaatgatctgtgatgcctctactccatctagatttcctcattgtgtagcactgattttactcttagtcttaacaccacgaatcagtactgaaagtacaggtgaacacaagaaaatttgtgtgaaaaatgttgaatggtacagaaactcatgactccactcctttccatctgtcagaaatttgagccccatgctgcctgggataaaagggaaggctctgcttcctctccccagagaatatcacgcgagcacagagggttcgatttgctggacaacaatagtctctggacaatcacgaagtcttcatttttcttcttctgaaaacactgtcacctgcgtgtagccattgtcagattcaggaagaaaaatagggtttggttaatttttgaagatagaatttgtcccccaatttgcctagaaaggaaagcaaattaatatgcaagcaggaaggaatgtgaagaccaatactaaaaatattttgcagaatctcagaatttcctaagcagactatgattttttttttttttgagatgttgcccaggctggagtgcaatggtgcaatctcgtctcactgcaacctccgcctcccaggttcaagtgattctcctgcctcagcctccgagtaactgggattacaggcatgtgccaccatgcccggctaatttttgtattttcagtagagatggggtttcaccatgttggccaggctgatctcaaactcctgacctcaggtgatccaccccccttggcctcccaaagtgttgggattacaggcatgagccaccatgcccaaactctttttttttttaagtttgttttactacagtgctcaaagccactgaaggaaggtcaataaatatatattaatgtaggtaattctgtacttttattttttccactactcctacccaattcacatcaactgataaaaattcaatgagtagttttttttttataatgcattcacatctttcaagcccatggcaaaaacagggaaagaacacagacagcacaaccataggaaatccaattatgaaagggcttcaaatctgcccacttaggacaacatttctctttgtgatctcctgctggagatgattacacattagctataagtatatttaaaaagttgttattctttctgaacaatgaattgtcacataagctctgggtggcatagtttggaaattattgttagaggaaaataacctcttgttgaactgttgctagcagcctgtggcaatttctaattaacacagctcaggaatcctcagcctcttaatgcagtctagaggaggaatcgagaaattacctagatggtggcatttttttacttttagttagattggtggttcactacagtgctccttttataaaaaagagaaaatacagataacaaagaataaaacgaaatgcatcgattattctattactgaaagtcaactgctgtcaacaatttgcaattttttattccacgctgctctttgggtgggatgacagagctatggcacaggaaggcagagatcatttttacccagaggagattcttctgcatgctattttgaaatctgcttttctcatttaacattatactatcactttcttcacctgaccaattctatttttatgtcaccctcgtttacggtgtctagtgtaagggtgtgccacaatcaatatgaaagacctattggatcatttcagctttttttcttacagacaatactggaaattttttaaagccccatgcataaaatattgatcatgttctcaatacattatttttaaacattttttattgatgcataatagatgtacataattttggggtacgtgtgataatttaatacattcatgtaatttgtaaagatcaaattcgtgtacttgggatattcatcacttcaaatatttgtcttctcttcatgctaaaaacattcgacttattctattctagctagtttgaaatgtacagtaaactatagtcaccctcctgacctatcaatcaataaattcttaaatgcagatttgctcattcagaaagcatgtgtgtttgaagactttaaaattgcatactgccaaagcgccacggtggaaacaagcttcttagtggtccaggtagttgattaagaaattatctaagacttcagagggaaataaaataacatgaaaatataaaaccaagaaatctagatttccattgtcctctggcatcttttctgagatggaaattgagtctggataacacagatataaaaatgttccacttagccatttttcttcctcttttggggaagagagaggcaatgttaatttcagctgcttatactaattgaaccaagccgggttggaccaattatccagtgtgatactctctactgtaaatcacaacatcactacctgttttactaccctgtggacataacctcaggatacttaaggctcatctcacacgggggtagcagaagtctagcccagggccttagcatggtacatcatcattaatccatagttattaactgatgtggagatgttacatttgtaagattaaataaagcattgtctgttgttcacatagggggaggggggaaagaaatctatctaagaaagcaacgcacacttgcttcccatataaagctagtgtacattttctcttttctccctcagcaactcctctgcttgaggggtaagtgaatttgtcaacttgagttccaatggcaagtaaaatgtgggtagagaattaagcaataaaatgttcttctcttgtttcccttttggcagcaggctttgctttggggatagtcctaaggacacatgagttggcacactcttaagtatagttcccttatgtgtgattttttttcttttcttttttttttttttgaggtggagtctcgctctgttgcccaggctggagtgcagtggtgcgatctcggctcactgcaatctccatctcccaggttcaagcgattctcatgcctcagcttcctgagtagctgagattataggcgtgcaccaccatgcttggctaatttttgtatttttagtggagatggagtttcaccatgttggccaggctggtcttgaactcctggtctcaagtgatcctcctgcctcagcctcccaaactgctgaaattataggtgtgagccaccacgcccggccaatatgtgtgatttaaaatggaaaaatactgctgcaggcagagtgagtgaagagtgattcccagggtaagccacactgggcaaaagggatttgtggaagattcttctgttccatgattagttcctaacaagcacaaccttccagactggtgacagcatttcacatttactaaaggaaaaatacccaatgttacggaaaacaaacaaacaaaaacaaaaaacaaacaaaaaccacaccagaaaacctgcctttaaatacaaaaaactaataatccacagcctagaacacattcgtcatctatttaacaaacacttccccaaagcgagaaaacagttttgaatgctgccagaattaggttgcagactttctaagaattgtttggcccgtgcaaagaaagaaagaaaaagtcacatgctattcactgactgtttaaacacttctctgtttctgttcctcacccagttgtgattttcactctcctgtctactttctatctcaaaactctgtttatttcactcagagctctttctaaactctggaagtgtttgcttgttaattctctttcttttttaaattgttggtctctccactagaaggaaagctcccatgaagtacactgttctacctgctggggaatctaaaatcattcctggcacaaaggaaatactcatatttgttgcatgaataaatgaaagtatccacttactttttttttttttttttcgagacagagtctcgctctgtcattctcctgcctcagcctcccgagtggctgggactacaggcgcccgccaccacgcctggctaattttttgtatttttagtagagacggggtttcattgtgttagccaggatggtctcgatctcctgacctcgtgatccacttgcctcggcctcccaaagtgctgggattacaggcgtgagccaccgcgcccagcctcccaccccttttatatattgcttaacactggctgcctgattgactctcaggctggaatgacagatggtcatctaagtagcttcaaattctgataagtgctatgaaggatgaaggaagtaaagtggtccatgatgggtgtatttacttgattctcaactgtacccaagaaaaataccaatgcaagtgttatgacgaaggacaacctacatggctgcgctgctgggaatcatttggtgaactggagagtgggtgccccatcttaagggacagtcacaactcacattctgtctggaaatatagggcaaaactacccattatggggaagtctgaaatatagaattgtattgacatattattgctttaaaatatcatcaactttgttaattcaaaaatataattaattaattaaaatattatttaaaacactatgtaggccaagtaagatgcatctctggctagaggccttctacagatggctagttttcaacttctggtttatgttttttattttattttacttcttcaaacccacagccaacatcatacaacttctggtctaaatgcctagctcaacgttctctagaagaaccattccttggaaaattgagctaccttgttagaggcccaacagctacatggatgattaagtttgagaaacacttggttaaacaaagtgaaacaggcgtgcttgctgcaggacttctcagagcctttagtaggtggatgtccattgtgaatcttcagtagagactataaagcaaatagattttctgaaactattccatagcagagccctatttctaggcccatcttattggactaacgttccacagaccaacttggaaagtactatcacgctggttaacattaggtgtcaacttgattggattgaaggatgcctagatggctggtaaagtattgtttctgggtgtgtctatgagggtgttgccagaggagattaacatttgagtcagcggactgggagaagaagacccaccctcaatgtgggtgggcaccttccaatcggctggcagcatggctagaacaaagcaggtggaagaaggtgggataagctgggttgctgagtcttccagccttcatctttgtcctgtgctggatgcttcctgctcttggacgttagactccaggtactttggcctttggactcctggacttacaccagtggtttgccaggggctctcaggcctttggccacagactgacggctgcactgtcggcctccacacttttgaggcttttgaacttctgccactactggcttcctacctcctcagcttgcagacggcctatagtgtgatttcaccttgtgataatgtgaggcaattctccttaataaactccctttcacatatacgtctatcctattagttctgtccctttggagaaccctgactaatacaactaactttagaattttttaaagatataagatgtttcaaaagttttaaagtgtttcatctctttgaacctataggcacagtggttaagtgtgtgggcatcggtgaccaatttccaccctgccactttctagcactatgatttgcacaagttactttacctctccgtgacttagtaaacttgataagttatagccgttacaacttctgagggggcgagtcagatgggacaataccagagggaatgataactcaaaatttattttacaaattaattgcaaaaaacaatttactagatatttcaatggattaacgccatgacatgttaaagaccaaatttaaaataccaagtagatagtacaaatgtagacttgtactatgattctaaagtttaagtgaaatcgtatacaccacatattttgcaatgactttctatttcaacttgtgttaggcagagcagataatgacgttgcaataatacatcctaacagtctgaaaagttgaaccatgacgtgtaccacccttattcttgtcaggttcatttaacaaacattattggatgccaacatgtgccagccattgtgctaggcattgggaatactcagttgcataaaaaatggtcacgtctcttaagataactgtctcaatgtgtcgaagtggtcagataacagaacagcgttctccaaatttcagactgtgatcattagcagatttaaaaataaggtagtgggtcaaaaccagcagtaaacaaatcaaacagaatagaaaagaatacaaaatccctgcaggtgttacatgctgcaagaatagtattacttcatgaattctttgtttcatgtatgcgcatgtatatcagctcaagtaaaatctagttcttactatggggtcacagttaaattagaaaactaatgtaatggatacactcagatgaattaccataggtggatactgtagcagcttctacttgctccattcacttaatgatttccagacaatgttaggtagagaagataaatctggtttctatctgtggcatgtcctctttgctggaagagccttctttctactgaagaaactgaaaatgctggctgatagctatttgcaccttgacacagacacgtgactcaatttcaccaaagggctctgaggataaattttaggaaactcctttcttatttataggacattatgacacatacatcggaaatattacacgtccaattccaggtcactgcaatagagtcaatatcacaatagagtcacacacatttttcggtttcccagtgcacataaaagttctccactgtcctggagtctattaagtgtgcaatagcattacgtctaaaaaaaaagtacatactttaatttaaaaataccttgtctcatggtgtatatgtaccacattttctttacccagtctattgttgatgggcatttgggttgattccatgtctttgctattgtgaatagtgctgcaatggaatactatgtgtccataaaaaggaacaagatcatgtcctttgcagggatatggatggagctggaagccattatctttggcaaactaacgcaggaacagagaaccaaacaccgcatgttctcacttataagtgggagatgaacaatgagaacagatggacacaggaaggggaacaacacacactggggcctgtcgggggttgggggagggagagcatcaggaaaaatagctaatgcatgctgggcttaatacctaggtgatgggatgataggtgcagcaaaccaccatggcacacatttattttaagttctggggtacacgtgcacgtcacccgggctcctgcacatcctgcatttgtaccccagaacttaaaataaaaattacaacaaaaactttatctctaaaaaatgctgacacaaagacacaaagtgaacacaggccattggaaaaatggtgctgacagacttgcttgatgcaggattgtcacaaacctttaatgtgtaaaaatgcagcatctgtgaagcacaataaagagaggtactcctgcatacttggaatcatgttaaaaccacaagggactaagcctagggactaagcaacaatggaggacaccagtagagaaagactgaggcgggcttgtgggggctgtgaagatgttgaaccaacctgaactcccctacctctagggttctttttacatgcaagaaatagtacatcctccttgttaagtgaaccactattaattgattgttgtgtgtgtgtgtgtgtgtgtttcctgcagccaaagtaaaaatgatatattaccaacccctaaatgatacactattcaaactccatcactctgaaaagccatttgatctatttcataattactcatttctaagtttctaacaatttagaaaatatacagttttatttagcatgactactactgatggcctatattatcttctaactttacaaaaacccctagggcaggtagtagcttccttttgtggatgaaaacacaggtttttaaatgattgagtataacaggcttaggtgacagatggatctcgattccacttctgccactaattagctttgcgaccttaacgcaggtaacttaagttctccccaagttctctcctctgttcaatggcaatagaaatacctaccttgttgggtttttttaacaataaaaacagataatgtatgcaaaatgcttactgcacagcctagaaataatgaattattttaaaatggggctattattgtcatttaactcaaccacacagctatttagtggtagagtctggactcatacctaggtcacccaggctcctaacacttccacatcacctctgccactgcaaacatctcatattaagcgtttcttactgctaaatgcatcaaaatcccagtggtatagctgaggaccttgtttactccaaaacttgcataatgtaagatggattttccctttgcactgacaaagtcttttgggtggctagttctctttaccagttgaaaaggcatggccttgtggacataaggcagaaacaacacaaaataaaaaacagttaataattcacttggccttctaatgttgaaattcggtaattctttttatttgtttttatttttcacttgggattttgggtatttacaactttgcatatgctaacatctttgaatttcattgcctcaagttgtaacttcattgaacaagtttcaaataattggcaaaaatagaaacgttgactatttaagactatgggctttggagatggacaattttggctgtgccaccttttagctgtgtgtcaggagtgatatgctttctctgaactgttgacttcttcatctgtaaaatggtgaaaatacaggaattccctggtaagatttgatggctcaatgagctgatttctacaaaatgatttaatcacagaatttgacttaaaatgcgagagggattcatgctgtccgaaatcatccaagagtggagatatctggttagcttcatggagaacctggcactgaatatcaagtcaatttttgataaacagagagagaaagggacataggcagagaaaataccaggagacagatggcgtttgcacaggtcaggtgttggccatattgactggagaaatttaagggaagggtggaaaatgcagttggaaaataggcagaggaaacattgtggaaacccttaaatgtcagacaaagaaactgaggcttatgggcatggacactaacatttctattgtttcaaaaataattttacaacttttatacctttctcacccaagttaggacttgtgcctttggttatacaactcttaaattagagtcaactgtgctatctctgtgagtttgggttgaggactatggaagggaaaggcaaaaaataaaagtaaaatgtgaagtagaagacagggagaaaacccataatactggtaatagctaatttctctttttcttctttcaaaatgcaatttgtgctaagtactttatatggcctatctcatttaacttctaaaagtgtgaacaatgtgagaatgtgctagatactattattatccccattttacagatgaggaaactgaggctcaggaggtgaagtagcttgcccaagatcacacagccagtaggtgacagaggtagagaggaaacctaggctacttgactatgatgcttatgtttaattcactactaaataccatgtaggaaaggactctggagaccttagttctttaattccaattctaccactaaacagtagagacaggatgaacttgtcattcactgagatggaaaaccccgtgaattaaactggtgggcattttgtttttgtcattgttaggcgatgaatgaagagttccattctggacacattagggttgagatactcagtgagcagccaaatggggatgtagaaattcaagtagacatgtggaagaggaggcagctgagactcacgtctggacttcagggatggatcccggctagagatgtaaatttggaacttgtcaacccatagcagtatttaaacctttgggactgagggaaaccttcaaggaaataagcgtagttagagatagccaagaagtgaaccctggggaagtccaacatttagagggtgagatccagcaaaggagatgatggaagagtaccagggaggtggaaggatgttgtttcaaacagcaaggtgtggcccactcagtcactgtgtcggattcaacttgcaggtcagacctactaggacaaagatagagacctataggatttggcagccagggtgatggtagggaatttgaaacatcatggtggctgtgacaagagcctgaatggagtgtgttcaagagagaaaagaagagaagtgaaaacacagaatattgttcttattattagtagcctgagccaatctgaggaccgatgcacttatcacaatgtctcttaaaatactatgtctcttactagattatacactccttgacagacgagaaacatgatttatttttcaaatgccttgcacaaggttagtgcgaaagtaacgattgcaggatttaattacacttttaaaagaaaaaagacattcttcatcttatgaaactctgcatggcaacactttatgcgccccacacccccactcaacacaaacacaactctggaagtactgtgttgataacagaaatgtggtgggttttatttttaaccaataaaggtcaagtttgcattatgtgattttgtgtgtgtgtgtgttgaatcttttaaatgcatatcttacagctctggttcagttgttgtggggagaggaaaaaaacctcatccctgccaacacattggtttgtatgaatcacagctcagtgaaacctttcaggcatataatttatcttttctttggcctatgtagtaaacgcttcatttgttcatgaattcttgccttgttttaattatgctttgccctgaatgtagttttataaggcacaaaaataagattgtcgttctgaaaacacagaagatttgtatgtttcccccaggatgaaatggtggcatctttctcccaattcacagctctgtgggcttgtggctggaattccaatccagcagggagcaagccataaaaatggggggaagggctgctggagggaggcagtagatgcggctgagcccaaggcataattcaccctaagaattctgaatcaatacactgacatccagccatgtacaatgtggtactcccaccaagaaagccactgattgagaagttttattcatgttactttctgagggttggattgtcccattacatttatagaacaattgcttttttccccctaaatacagaactatgcagccgggagtcagaaaagaaaccttgacaatcagaaggctgttttgttgttgttgttaaaaacctttgcaggcatatgcatctgaatatccataagttcacaggctgagggagaaatggctatttcataacttttctgtgtttctcatgtacatagtacaaagtgggcactcagtatttcaaatttcaatatcactgaaaaaaatggaaatttgtcatgtaacaaaatcagatgcagacttcactggtgaatctgagggagtgaattcacttattcagaaaggaagacagttacaattcttgggtcttctgagagatcattataacttgaaaatattacacaagggctttgctatattagatacctgccatgttcctaacacaagctcccattttctgactcaaatctcattttggaacacattccactcaaattgaggttctacccctaagagttctttttcaataaagaaagctgagttaataaatcacaactccaaaacttttcctcacttttcttagactagaaatagattgagtgtgtcgaggttttatggctgagtacattggagggctggctattctatgctgaactggtttacttgattaagatggggatttggatgagtcaccggacacctgtccaaagatgagtaaaacacattccttcattgtcttcccataaataactcaatcttctcctaactgagccaatggataggctttggatgcccaagcaaaacaaacacatgactgttaaaaaatcacaacctcaaaatggccttagaagcctatgaccaataatgagaatggtttctccactcaggcgcaagtagtaaacagtttctcccatatgcaggaatattgacgactagtttaccgcctctgggcacgtaactttcaggtcctggttcatgcatttgctggaatgttccctgggccatggagcccagttctcctggcatctggcatctcccccacactctgctcccccagcacagcacttggcatcttgcattgcaattgcaggtttatttattcacttctctcactggacagcaaactccaccagggccgagactctgtgtctcgcccttcactgtggtccctgtgcctcacctgttcctagtacagtgtcacactcagtaaagagcagatgcctggtgcatttggagacttattttaaattatacggaaagttattcaaccggcttcttgaactggtgaattttggaaagtgggtgtttgaagggaaaatgtttaaactctgaaagaaatgttggaaataagctctttgaatcaaaatgtatagaaaacacaagaatgctgacagtaagagcctaaaacacatgatgactattatcttttcccaattttaactctccagagtgttcagcggtgcccagccttcataatgtaattcttcgtagcaccctggatgcattaaaaccatagattaacgtgatacttattttcattaaggaaaataatttacgtacagtgctcagagtagagcctggcacattgaacattttcaataaatgacagcaagtgtaattattagcacttcggaagtgcaaagttgcattgtattaagacaaatatatttggagctcatccaattttttcctggctctgaagtctgctagtggcacttaactttattcccaagttttgaaaaatattgttatttaaaaagtctgttaaccaaggaaatgcatgccctaaacctataatgtatcaagttttacttccttcttcttttaaggagttcttttcctgccttgaatacaaacaggctctctcaaggttaaaagcaaatgctctttttagtgtcaaaaagagcttgcctttcttcgctcaggaaaaaaagcaactgattccaggataccttctttgaaaaccaacacaaaaaaaccccccaaaaaacaaaaaaaaaacccaaaacccctagtttttacaaaggtttattactcctacttgttggaaaagaattactacataaaagagtctgcccagagctgtaaaatctccttattcaaacacacaccttagagcaaaagatggttaaatatcaattcaggctattaacagtaagggacgaaatgtgttccaacaaaactctgcatgtcaacaaactacagagactaggtaacatcttttaggaatcatttttattccactaatgccttttcctccagaatccactgatcgtaaacgcaacctgtctacttccgcctttgaaaaatggatggacaaattcatctgcatgtaactcacctcctcttttcttttacataaaacagatgccacagctgttattgttcttcacacagaagtttctacccagagaaacatcaggatgacactctgctgcaatgtgctatttgttctagaggggtcaacagcttgccaccttgcctaggcccagggtgactgcatatgtgcagtggtcttatcccattagcgcccccgagcatgcattcagaaccaagtggatacaccttggcacacttaccttccctgcagggacatcatcggactgccctgataagccaggaacctcatccaccttgtcttgatgctctgccctcttggcttcctgttggctgtcacctggcaccttttcctgtcccttgtccagcttgaagaatttgtcaaaaaagctggagtccttgggcttggagggagcttctcctcctgctccccctgtctcaggtgggagaagcgtgggatccctggcggcagagaggaccttgtcttgggccggggcgtgccctggggttttatctgtgtcctgccccggtccagctgccaccggaagtgtccagctctcacttgggtctttgttcgctggagctttattggagctgacatcaagcttcactgatccaagggatgaatctgcggcttggtctccggtacgtcctggtacaggccgagagagcatcaagaaaaaacgagatttagcagctggtgcctcgggtttggcctctttcccaagattctttccgttggcatccgcaacagcacttatctccgttgtctcgggggaagaagtggccacattatccgtcttgacacttattcccaagtcgactgtaaacacaaacataaacagtggttattcagccaagccgggaaattcaggcactaataatggactccagacattttttatacaaaagccatactgcatactggaactgtgttgttctctggtcattctgaaaggcagaagttagctctctacatctccttggaccctgcttttcttgggagaggagaaggcaaggttggtgaggagggaaagctacttaatggaaagtcactagctgccaggtgtggaatgagtgatattcaatgttaattaatcttcttttatctgtgtaagaactccgtgagcagcatattgtcatgatgtcaactgggaggcagtacagcagttaggagcttgggttctggagctagaacaaggtttctcaacctcagcactactcacatttgaagccagattattctttgttagggaggctcatcccgtgcctcataggctgattagcagcatcctggcctctgcccactagacgccggtcacatttcccagtcatggcaaccaaaaatatctctaggcattgctaaatgtcccctggaggacaaaatctcttacgtttgagaggcactgagctgaaatgtctttttgaatccagattatctaattttctgtgcctcaactttctggtaaaaggagacagataataaatctcgtaattttgttaggaagattacatgagttaatagttttaaagcaagtacaatagcacctggaatatattaagtgcttaataaatatcacaaacattagttatcattattcatgagtgagaaaactgacagtcagagaggtcagtacaccctcccctggctgcccagtaagctagtaagcagcagagtctggcttcaggcagaaatctgacttctaagttcatgcgctctctgtcttaccagggacttgtattagcatagactgttaagaatatgggaagatttttaaaatacagtactcagaaaatttctctttgaaaggctggaagagcagatatccacacaagaaggcaaattagacctcaggccagtgtggaattaaaggtgtagggttatctggtcaagactgtgtgtgtggatacaggctccaacccctccaggcaagggcactgtttccaacatccaccctttctcctttgacctctaccttgacctaaattaactataaaaggtccttcttttctaggaccctactataaatcagtgaaatattcaggaaaaaaagaacaccaagaatgttgggatcccagttaaagatcaagattctctactgataagctgtgtgatatggagtaaatcactaaagatctttgaatctcttcatttgtaaaatgggaatattggtagtcctactgcagggttgttgtaatgcttaaagaagaaaagtcatgcaaaggatctggcacaacgccttttccataataagtgcttagtaattgacagatactgtgataacttttcaggtttctctcatgcctttgacaacattgcattttgcttgctctatctgtagtcagacacttcttaatatctgtttgcaggaagacagaaaaataaagggaagaattgagatttctttgatctattcatactgctcattaatatgtagtgagaaatacatacacacacacatacacacacatgcatccattagcaattgtttttgcccaactctagtgtctcgcagtgtctagactaaacaacaaacaaaaaaggggggagagtgagctggattaagcattgaggcacagtgaagaaatggtctggggcaagcccagggatgaatgttaggggtttctcataaacctgaacctgaagaaaatcaccctgccagcatattgatcttctagctcttcttaacctttttttctgtgattcaggaattcataatgatagaaaatattatactaaagaagaaaaaaagagggagaataagtaagtgatagatggatgcatcagggtgtaaagttagcaagtaaggctgttgaagtgtcagagtgaatataaatgaattgtgggaatggtccatgccaggagaagagggtatggttgacaaaaagggaaatgctaagattcaaaacagggaagggcttttcaaaatgccaagagcaccaacttatatctttcagtttaattcctctcttccttacccactggctggaaagcaaaggagctagtggtaagtaagagtgttatagccagagaaaaagtcttcaaaaaacacaaagtactttccatggacaaccttttttattttaaagtgccaatatgttgctttgaaaaagaataaattccttacatccaggtatctggactagacttcagtgcatttagtgattatagcaaatccaaacagtagcttttgatatcagagaatgggtaaagtgtttttgacaatttctaagaacttagagttcttcggtgatacgttccatgcaactgaagctctgctctccaaatttaggtgggtacatacccaagtccatcacctggggcttctatttcctttgctcagatgctcacctcctaggtgggcacctgacataagatagactaataaaaataagtcctgtaacttttgatactcctattaaaaaagagttgcaaaccaataggaggtacacttgagaatcagcacaaatgaaagtagaacctggaaatccaggaagcagatacccaatcatgtcatttaaacatttagatccagctgtgcctgaagctgaactttagcattacataagccaataaatcactcttccccaacttacgccagttgaaattgaatacatactcagtgactttgagagaattccagggaattggtcagtccctgtttcacttgtaaatacacagcaatcaagcctaccaaatctatgattgattggggtgtctgaaagagatggagggaatggaatcaacctgaaaaacatatttcaggagttcatccctgaaaacttccccaacctagctagaggggccaacattcaaattcaggaaatgcagagaaccccagtaagatactccacaaaaagatcttccccaagacatcatcatcagattctccaaagttgaaatgtaagaaaaaatgctaaaggcaactagagtgaaaggcccggtcacctaaaaagggaagcacagacttacagtggacctctcactggtaaccctacaagccagaagagattgaggaccaatattcaacattcttaaacaaaaagaattccaacccagaattttatatctgactaaactaagcttcataagcaaaagagaaataagatcattttcagacaagcaaatgctaagggaatttgtgaccattagaccttccttgcaacagttcctaaaggaagcactaaatatggaaagaccattaccagacactacaaaacacactgaagtacacagaccagtgacattgtaaagcaactacataacaagtctgcaaaataaccagccaacatcatgatgacggtatcaaatcgacacatagcaacactaaccttaaatgtaaatggactaaatgatcccattaaaagacataaagtggcaggctggataaagaaccaagaaccattggtatactgtcttcaagagacccatctcctatgcagtgacacacataggttcaagataaagggatggggaaaaatctaccaagcaaatagaaaacagaataaaacaggggttgcaatcctagttgccgtcaaaacagactttaaaccaacaaaggttaaaagaaaaaaatatgggcattgcataaggataaagtgttaaattaaacaagaagatctaactatcctaagtatatatgcaccaaacacaggaacacccagattcataaagcaagtttatggagaccttcaaacagacttagactcccacacaatagtagtgggagactttaataccccatgacaatattagacagatcattgagacaggaaattaacaaagatattcaagatctaactcagcactaaatcaaatggccctgatagatatctacaggactgtcctacttgaaaccatacaattacatggtaattgaatgacctgctcctgaatgacttttgggtaaataataaaattaaggcagaaatcaagaagttttttgaactaatgagaacaaagatacaacataccagaatctttgggacacagctaaggcagtgttaagagggaaatttatagcactaaatcccacatcaaaaagttagaaagagctcacgttaacaatctaacctcacaactacaggaactagagaactgagagcagaaaaacctgaaagctagcagaagacaagaaataaccaaaattagagctgaactgaaggagattgagacatgaaaaaccattcaaaagatcagtgaattcaggagctgttttttttttgaacaaattaataaaatagaccattagctagagtaataaacaagaaaatagaaaagattcaaataaacacaatcagaaacgacaagggggatattaccactgaccccacagaagtacaaacaaccatcagagaatattatgaacatctctatgcacataaactagaaaatctagaagaagtggataaacttctggacatatacacccttctaagactgtaccaggaagaaattgaatccctgaacagaccaataatgagccctaaaattgaggaagtaatacatagactaccaaccataaaaaaacccagtactagatggattcacaggtaagttctaccagttgtacaaagaagagctggtacagttcctactgaaattattccaaaaagttgagtaggagggagtccttcctaactcatttgatgaggccagcatcatcctgatatcaaaacctggcagatatacaacaagaaaagcttcaggccaatatccttgatgaacttcaatgcaaaaatcctcaataaaatactggcaaactgaatccagcagcacaccaaaaagcttatccaccatgatcaagtagaatgcaagttggttcaacatatacaaatcaataaatgtgactcatcacataaacagaactaaagacaaaaactacatgattatctcaacagatgcagaaaaggctttcaataaaattagacatccatttatgttaaaaactctcaataaactaggtattgaaggaacatacctcaaaataataagagccatgtatgacaaacccacagctaagatcatactgaatgggcaaaagctggaagcattttctttgaagactggcataagacaaggatgatctctctcaccactcctattcaacatagtattggaagtcttggccagggcaatcgggcaagagaaataaataaagcgcatccaaataggaagagaggaagtcaaactatccttgtttgcagattacatgacattatatctagaaaaccccatagtctcagccccaaagcttcttaagctgataaacaacttcagcaaagtctcaggatacaaaataaatgtgcaaaaattactggcatttccatgcaccaacaacagtcaagccaggagccaaaccaggaatgcactcccactcacaatcgccacaaaaagagtaaaatacctaggaaaacagctaattagggaggtgaaagatctctacaaggagaataatgaaccagcgctcaaagaaattagagatgacacaaacaaatggaaaaacattccatgttcattgataggaagaatcaatatcattaaaatggccatattgcccagagcaatttatagattcaatgctatacctattaaactactgttgagattcttcacagaaccagagaaaactattttaaaattcatatagaacccagaaaagagcctgaattgctaaggcaatcctaagcaaaaagcataaagctgaaggcatcatgctacctgacttcaaactatactacaaggctacagtaaccaaaacagcatactactggtacaaaaacagacacatagaccaatggaacagaatagagaacccggaaataagaccacacacctacaactatctaatctttgacaaacctgacaaaaacatgcaatggggaaaagatttcctattcaataaaaagtgctgggataaccggctagctgtacacagaagattaaagctggaccccttccttacaacatatacaaaaatcggccgggcttggtggctcacgcttgtaatcccagcactttggaaggccgaggagggcggatcatgaggtcaggagatcgagaacacggtgaaaccccgtctctactaaaaatacaaaaaattagccgggtgtggtggcaggcgcctgtagtcccagctacttggagaggctgaggcaggagaatggtgtgaacccgggagacagagcttgcactgagccgagaccacatcactgcactccagcctgggcgacagagtgagactccgtctcaaaaaaaaaaaaaaaaaaaagaagacatacaggtagtcaacaagcatatgaaaaaaagctcaatattactaatcatcagagaaatgcaaatcaaaaaccacaatgagataccatctaataccagtcagaatgatattattaaaaagtcaaaaaataagatgctggtgaggtagtggagagaaaggaatgcttatacactgttggtgggagtgtaaattagttcaaccattgtggaagacagtgtggcaattcctcaaagacctaaagatagaaataccattccacccagcaattccattactgggtacatacccgaaaaatagaaatcattcttttataaagatacatgcatgtgtatgttcattgcagcactattcacaatagcaaaaacatggaatcaacctaaatacccaccaatgatagcctggataaagaaaatgtggtacatatacaccatggaatactatgcagccataaaaagaacgagatcatgtcctttgcaggaacatgaatggagctgaaggccattatccttagcaaagtattgccgaaaaagaaaatcaaatactacatgttctcacttataaatgggagctaaatgatgagaacacatggccacacagggggaacaacacacactggggcctattggagggtggaaggtgggaggagggagaggatcaggaaaaataattaatagatattatttcatcacccaggtattaataatacctatttcatcacccaggcttgatacctgggtgacaacaaacccccatgacacaaatttacctatataacaaacctgcccgtgtacccctgaacttaaaataaaagttaaaaaaatgcaaaaagatgacataccaaagagatgttacttttcatttttaaaaaagtcaaagaatttaaggaaaattaaaaagaaatcaagaatgacagtagcagctccaaaatatttagaaggtagagttgaaaattttgattttcttagtgcagaaaaatattttgtgctgcatgtttttttaaagaaagtcattttatctgtatatgtgattaaaaccttatttccagtgccatcttcgtgtaattgttaagaacttggattgtggatcacaggaacctggctttgactcttaactgctcactctttaaatggataacccgggtaagttatttcctgtctctgtgcctcagttttcttacaaattggcatgaaaataacagtgcctccttcagagggtaattctgaggattaaatgaaatattgcccatacagtgcttaccacaggctggtagatgattggtattcggtaaacagtagttatttttgttatactaatatgttattaatataattaccattttgtatttttaaatgtaagccataaggaaaggaattattccaatagtttaatttacaaacttgagttttctagaaagacttttaaaaacagtagtgatataaatcaatttatcttaagaaacataagtatctgggccaggcaagtttcagaaatgtttatcattttcaaagtaccaaatattctcgtcaaaacaagctgcttcatcagagttctaattatatatttaaacatacatgcacacacacacgtttgtattacaatattcaaaacttctgaggaagaattatcttttttttttcatgtgccaaagctaaaactttcacttgctacagctgtgtattagtctatttccatactgctataaagagctgcccaagactgggtgatttataaaggaaagaggtttaattgactcacagttcagcatggcagggaaggcctcaggaaacttacaatcatggtggaagtcaaagggggagcaaggacctttcttcacaaggcagcagaaagaagtgccaaatgaacagggaagagctccttatgaaaccatcaggtcttgtgagaactcacttacttttatgagaacagcatggaggaaactgtccccatgatccaatcacctccacctggtctctcccttgacacgtggggattatggggattaaattccagatgagatttgggtggggacaaaaagcctaacgacatcaagctgtaaaaacaatagctaacattcattgactgtttcccagcattaggataaatgtgtgtaacaagaggcattttatttatgtatgacatttgtttatttattatttatttatttggataaatgtctataacaagaaacattttatttaagtataacagcaaatctacaagttaggtactatcatcactcccattttacaggtcgtgaaactgaggctctgaaaagtcaagtcagttttctaatgttgtccagctaatgactggtagatttagtatttgaacccacatttgcctgattccaaagttcaaactcccaacaacatgtggtaaccaaagcaggaacagaagagaaagaagaaatagaagggagggaagatgaacaaagtagacaaagtttagttaatagaattagtggatacccaagaaaaaactatgtacaagagggggaaaaaaaccctgttttctcacatctgggaaacattgatatctatatatttttggttttaaataaaaattaggttatgtcattcatttgcataaaaccatccaaagaagggcctcacaaaattaaaacaaaatccaaactctctactatgggccacaccctccagaacttcagctcgtactatgtttttcctcacacctctcaacataccaacatgtttccacctgcagccctcaccactagttattctttcaatctggaaatattttcgctaagatcttcctatggttaccttcttatcattcaagacttaggttatgtcaggccttccctgactcctccatctgaagtaacccctcctgcttactcctgtttattctctagactccacagaggattcatcactctctgaaatgatcccattaatttcttcttcacttgtttcctctccacgacctgtaagccccaagtggacccggacttggtctgctctgcttacagctggattccagttcccatagtgctagacactaggattaagccaggaaacatgggtgaagcagcaagcacagagcttggggcacagcctagcaaacactccacaaaggaccatgattgtaactgtagtagggcacaccaatgaacaggttgggaaactgagtctctgagaagagactaatgttgtgctggatgaaatttctttttctgacaatacattatccaaatcctccaagctttcagtttaaaggggaaagcaggaactatcattataattttatttacaaagtgtccatgtatgaacattattcaccgccgaatcatctcttcctatgcaagcaacaccgtcctatgcatcaatatcctgatctgtcaggattcaggataaagtggacatatacacactaattgcaaagggaaattgtacatcttgcaaaagatgcaggggtttatagagtcttgtaacattggtgagctgctcagatcacacacatgaccgtggttggacaaggatctggcaaagttaacacagatcaccgaagaaggaaaagtggacaacacaacacagtaagttcttcaaaagagttatattagaatatcaaaagattatgttaggcctttgggaaaactcaaaactttatgaagacctcaaaaaattatgcaaaaatgacccttcaatggtcatgctgcaagagtcaaatgacacttcaaacaactgcggctttctatgttgtgcaaatgcatttgttgttttaaaggtcgtaaagtcagggtacacgtggcagatacttatgacttggaggaagacgttagattagatttgaaactttcactgaatgatcgcatttcatgcttttcatctgtacattaaaaagccagaatgtctttgccaagaaattctagcataaataaaagaaaaggatgggattttggaacatcatggtagaattcttgactatcagctttatacaacatgtctggacatttagtgatggaaatgctggattccaaaggaatgtaggcaaaggtactactacccccatgctcttcagaaaacatcctctaaaagcaacagtgatgatcagatactgtggggcaagactgacagtgacactcaagatttccactcttctctttaatcatatatttcctgtcattcatgtgctacaaaactctggaatatgcaaagctcattcaaatgcaaaaccagcctttgctccaacatgagcatatattttcatttaaagacaaatcagatgtttcatttgattttttttataaatctgataataatgtacatttaacccgtgtttacaaccaaaataattaatctctctgaaccctttgtttttcctgtctctatcctccaccctcattgccagataaataacatctgcaacctgatgtggcatattgaactttgtttatactcacacaaacacgtataagcatcccagatacacatatacagggactgtatctgtccttgttgtttttatagaaattggatcacattagacatattttctgatgacttttgtacattatagttggtcttcacagtcaatagctccaaagctatcttatcttctaaaatagctgcataatattcctcagtatggatataccaaaagatatttaaaccattgcctaatcaatgaatatcctggtagtttccacattgttttttccatttccactatagtggaataaactttcgtgttcaaaaatcctaaactggtgctatatttctatagaatagaggcacagatgtagaagtgttaccctcaaatcaatatgcatttagttttgaaaaacagacactgccatattattttcttaaaaaggctctacagattcacatttccagcagcaatgagtgtctcaagcaccttttaagtggtaagcagcttaccaggggaggtggcctattattctatcagtggcttcagttgttaggacaccacgggtcagctgtggagatacggttgtggggcaggttgagttcaggacacatagaagattgccaaagggtgactattattactttgagactctggaaaaattagccaggaaacagagacaagaggctcagggtgcagcaaagcagccaaatcaggatgatagtgttttctttggagcagatatactaatggccaaggaactcataaaaagatgcctaatgtcatctcattagggaagtgcagtcaaagccacagcatgatacgtcttcacacccacgaggatggccataatcagagagacaataaccagtggtagggaagatgtgaaaaaatcggaatgctcatgcattgctggtaggaatgtgacatggtgcagctgctttggaaagcagtttaacagttcctggaaaagttaaacatggagttaccctaagacccagcaattccattcctaggtaagcaagaaaatgaaaacatatggccacacaaaaacttgtacacaaatgtccatagcagcattttcataatagctgaaaagtggaaacaacccaaatatccatcaattggaaaaaggaaatctagcatttgcatataatagagtattaatcagccataagaagaaacaaagcaccgatccatgttatatcatgctttatacttggaagcatggtactaagtgaaagacgccagacacaaaaagcaaaatattgtatgattccatttatataaagtgtctagaataggcaaatccatagaggcagaaaacagattagtggttgccagtggctgggaatagggaaaaaactcagcgctaaagggtagggagttttgttttggagtaatgacgatgttctggaattagacgtggaacgattgcacacatggtgcaaatatccttaaaatcacggaattgtcactctaaaaggtgaattttatggtaggtgaattgtacctcaatttgtaaaaagaagaattagataaataaacagcaacacagcaccaaggggtgggggtaggaaacagacaacaaataggagtgaagagttcacaggaaaagacatgcagccagcttttaagcagaagaaaagatgtttggcctcataaatagtaaaataaaagcacaataaaattatgacacttggctttcccttgccaaattggttaaaaaggagacaattgatgaccccagtggaaagcgtataaaaaaagagcagctgtggctgggtacggtggcttaacgcctgtaatcctagcactttgggaggccgaggtgggcaaatcatgaggtaaggagttcaagaccagcctggccaacatggtgaaacactgtctctgctaaaaaacaaaacaaaacaaaacaccaaaaaatagctgggcgtagtggcgggcgcctgtaatctcagctacttgggaggcggtggcaggagaatcatttgaacctgggaggcagaggttgcagtgagccgagattgtgccactgcactctaacctgggcaacagagttcagagtgagactctgtctcccccaaaaaaaaaaaaaaaaaaaaaagaacagccatatagatcgtcggtgggagtgtaatttggccacttctttggaaaatagctcagtaatatctattaatacttaaaatttcacaaacactgtaagtctaacttccacttctaaaatgttatcctagaaataaaattgcataggggtacaaaggcttacgtatggaactatttgctggactactgtagttgtggcaaaaaactggaaatgacctaaacgcttattagtagaaacctggttaaataaattatcatatgtccttgaggacacagggacacaaagaggggaatgacaggcactgagcctacttgagggtgggaggaggaagtcgatcagaaaaaataactagtgggtactaggcttagtacccgggtgaaaaaataatctgtacaacaaacccccatgacatgagtttaccttataacaaacctgcacatgtaatctgaacctagataaaagtttaaaaaaataaataatcatatgtccctacaatgaaatattccacaggcattaaaattccccaaggaattttagtaaggaaagaaaaagctgtgcccaacagcacgtacagtatgtttccatttgtttttaaaaaatggtgtcgggaggttgaggagacaacttataaatagacatgcctgggatacctctggatataagaaactgtaaagtatttacttctaaggaaggaaatttgggatggggcttggggagccatcagagttagggtggggattttttctctgccttatcttattatgtatatcgctcagaatgtttgctatgtgtatgcacctaccccatccattaagaaatgaagaaataatgaaaagaaaaaatgaaagtagggaactagaaatgagaggtgggattcaaagtggactgaacacttgacctatttcccaatttgcctagggctggcccagcagcgaggcaggttctaaccaatgagcatcagctttgaatggaggggctgataggccaggtgggccctgcttgctgagagtgtcatggccttagggacatctccatgttgcagagtctgagcctctgcttggcaaattcagaaaatccagcttttctttttatatcacctggagctgatgtaactctcagaaggcatttttaagaggactcatgaattaaccacatagccaacttactggcttaagactacgtgacagaaagctgcaaagggggccagccactggtaacatcccaccactgtccctctctgtggaaaacacagatgggatgcacattgtgacgggcaggatgcctggagagcccacaaatctgcaagcacagctgaaattggttacaggatttcaatgtttcattgcttgaagctatgataacttgatgatgatgatgatgatgatgatgatgatgacgatgattttttttatagccatctttttagagggatttgaggtagggaaaaaaataaacctcacactatcggaggttgccaactatgaggtctgctgatggtttggccaacacagtgtttatatttttttgaattgggaaatttcatttaaaagtcctaaaatcaggctgttattgaaatatcttattattggctcagggtttcccagggcagccatccttgaagctgtgtggagccctataaacaaggacgctttccagttccctgcaaactccatttcattcagagccttgagccagttcttacatggtcctcagacttgagctagtgcaagaatacccgggaggggttgtgggaacagatagctgggccccacccccagggaagggggtgtttctgactcaggaggtctgggctccggctacagaaactgcacatctaaccggtacccaggtgatgtgatgctgctggcccagggacaactctgcgagtcactgctattgggcactgctattgcacccacacaaggaggcaggctctgcttacatttttcagttcttgttcccagaaacatttgctctttggggtatgctttgcatataatggatcctacccactaatacagtatgctgcttttattgataaacttccagaaacttgaagcgcaccttaccatttctttgatctcgctgattatttttatttttgttaaatgaaaattgttggtaagttctttttggtgtggtaaaaggatatgaaaagctgattttaaaaaaatgtccactctaggattagaattgtaggtgtgtttattctatttcaagatctggttaaaatgcaccttgaggaaaagaattgagtgcagctgttgttatttctcaatgctgtttctcttttcatgtttttttcatgttgtctcttggtctgtcctatctctcttggtctatcctccaagacagagatgagtgatcttgaaaccctgcccatgtttttatctttggagcccaactgtgctgccttgttttcttctccatccaaagaggcaaagagaaagttgcatattactcaacagcagttgcatgacagttaaaatcagactgtatgagtcatggaacagtaagttgtgtccagagtatctgtcatggtaagtacaaaaaagtccttaaaaatttaaaacagaaatgccaatgttttatttttgaaaaatgtgaagaagaaattttccggccgggcgcggtggctcatgcctataatcccagcactttgggaggccaaggtgggcagatcacctgaggtcaggagtttgagaccagcctggccaacacagtgcaaccccatctctactaaaaatacaaaaattagccagatgcggtggcacgcgcctgtaatctcagctactagggaggctgaggcatgacaatcgcttgaacccaggaggcggaggttgcagtgagctgagatcataccactgcactccagcttgggcagcggaaggagactctgtctcaaaaaaaaaaagaaaaaaagaaattttctaagtgtattccaaataacttttaatattggataaacattacgagtttaaaaatacttatgccagaggagtgctgtgactcgtgcctctaatcccagcaatgtgggaggccaaggagggacagtcacttgagcccaggagtttgagaccagcctggataacaaagggagacctcatctttacaaaaaaactaaaaaattagccaggtgtggtggtgtgtgcctgtgatcccagctacacaggaggctgaggcaagaggattccttgagccctggaggtcaaggctgcagtgagtgatgatcatgccattgcactccagctgggtgacagagcaagacctcatctcaaaaaaaaaaaaaaaacaaaacaaaacaaaaaacttacgcccaggtaaaaattgtcagagaaaaataagaaaaaaactgaatgcccaaaattagcataatggctgaatgaattatagtatgtctataccttgaagtacattgtagctttaaaaaaaatgaattaaagttataccagttgaatttggagttgagatggggaagattattacaattaaaaaaaaacaaacactattaatggatgtgctgggaaatgtctgtatggggctagttaaagtaaattaaaataaagaccagacctgaagaatccctgagcggacaaagcctgttagaccacataaatgagctaaaccttgcttgatttgcagacataagcaaaacaactcgaactgtttcttgtaaatgcctatgctaaagaaaaacagaacttgagctcaaccaatcagaaacagtcaacaaacttaaaattatataactgggtaccttccaatgagatgatcaaataaggcaactgtgtaattgtaacacatcaaacacattttatattatgcctctgcattttcccttaattctggcatgtaatgctttgtcatcaaaacactaattcccttttggttttcttttctcaaattaatgaattgcctctattcagatacactctttgaaattttattgtgtctcagatttgtcttttacaaagtatagaacaaagagaaaaatatgaaagaagaaatattaggttgttagcttgggtgtccttggagggggtagggaagatgtgagatgaggaagaagccaataagaaaaagaaaaagacaggtttcaccaaaacaacaataacagaaaatatgattgcatttattcatatatgttaattggtatgtatgtaagtatatatgcatgtaaaaataaaatacaaagaattaaaatgcatactaatagttatttcagttatctatggctgtgtaacaagcatccccaaaatgattgacttaaccaccattttattaggtcatgattccatgcattaagaattcagggccgggtgcggtggctcatgcctgtaatcccagcactttgggaggccaaggtgggtggatcacgaggtcaggagtttgagaccagcctgcccaacatagtggaaccccgtctgtactaaaaatacagaagattagctgggtgtggtggcgggcacctgtaatcccagctacttgggaggctgaggcaggagaatcacttgaagctggaaggcagaggttgcagtgagccaagatcatgccactgcactccagcctggtggacagcgcgagactccatctcaaaaaaaaaaaaaaaaaaaagaattcaggcagatgccaggtgcagtggctcatacctgtaattctagcactttgggaggctgagatgggcagatcacctgaagtcaaggagttccagaccagcctggccaacatggtgaaaaccagtctgtactaaaaatacaaaaattagccagacatggtggcacgtgcctgtaatcccagctatacaagaggctgaggcaggagaatcacttgatctgggacgtggaggttgcagcaagccaagatcgtgccactgcactccagcctgggtgacagagtgagactctgtctcaaaaaaaaaaaaaaagaattcaggcagagagaggataggatcagcttatttctgctctatgatgtctggagccacagctggggtgccttgaaaggatgaagatggctgggacggctcacacagggacatatgtctggagctttagttctggctatgggctggttcctatggtccttcctcatacggcatctattagctgaaatgcccatgatgtcttctttaatcacaggtctggttcctggactgggatggctggaatatttgggaactggctgggtacctctctcttgcctcatggcttcttcatgtgactagcttgggctctctcacagcatggcaatctcagggtagaacttctgatattgtgtctagcctttctcagagctagtgttgcaagagacaaggcagaagctccgagtcttcttaaaaggcttcttgaaagtcctgtgtcatcccttctactacatactgttggttatataggaccagcccagaggggactacacaggggtgtgaataccaggaagcatgggttattgcgtggtgggttgtatgtgtgcatctttggagactatcaaccacaataatgcaatagggaagataattttatctaacaggaattctccactagactttttggtgagaaaaagcactgagtttgagaaggatgagatttccccagggctcttgctcactcccaaggaagacagaggcacaaggagctgttgggccatctgggagagccagtgttcagaactctctgttattactttagactcagtggtgatacagtgcaatggagggaaagaagaaaggagagtgcctgtgagtgttaccagtggagagttgtccaggttcttggtgttttgaacaaaaaaattggacaaaatgcacaaagcaatgaaagcacagatttatagaaatgaaagtacactccacagagtgggagcaggtttgagcaagtggctcaagagtgctggttacagaaatttctggggtttaaataccctctagtggtttcccattggttacttggtgtatgccctatgtaaatgaagaggatgaagggaagttacaaagttatttacttggtgtacaccctatgcaaatgaagaggatatttcctgccatagctgaagtgcagttacatccatagttgagcatagaaagttgtgggttttctgcttgatttagttctaggaagtccttagcttccccgcctccagaccctattcccctacctcatgaggatggggtgtctcacagagtttcaaggtggagagttgaggatagggagcctcttgagtgagagacatatagcaatgtgaggagagagaaaagtggtgtttaggatgtgagttagatctccttaatgtcttttgaaaggccagagtgaggatatgaactactttcctttgctcaattctaataattctttggaatcacctctggcagacactgtttgtggcctgcccaatagccaatcgtctccagccccaaccatgtattattattattcacttgcatctcaaagagatgcttgattcccagtatcccatgcagctggtatgggccatgtgatgtagctctggccaataagaggatgcctacatggtggcagaggcttcagggaaggatcctccttcctcgcataatacaaggagaaaaaaaaatggtggcaaagtttggcctttcctctcctgcttttggatcccatgatgtagagatgtgatgtttggttctgtgacagccatcttgtgagcaggagtgacacaattggctcatgtacttggtgttttgatgaggctgtcagactgctgtaccaaatttagaactgccacctccagacttcttgctcaaattaaaagtgctatttacttatccagggttgcattccttgaagctgagtgcagcagagtctgggaacttgcccttcggccttattattttattcctctgctaccactggcttaatatgccactgttcattgatcaaccatttctaagtctttagtgtatctcaggccttgtgctgagctctgggaccctcataacaagaaaggatggcaagcgtcctgctctcagggacttttacttgagtttggaaacagataaaaaataagatcaattggagggaaatagtggacactaggagaacacatgtatttgctcccttccagacaagtgctgttgcctatattttttactacatcagggagctatgctttttggcatcaggtctcccattccactttgactaggcattgatattggcaaatgcttctcttctcactcattatgttattggcaggagcacttttctcaagttagaattttcaatccaataaaatgattccacttacatcttttttttaagaaaagcaaaattagtctattctttttaggaacaatgactaggagcaaaaaaggaaaatactaattttagaaaccttttatccaggtcaaacattccttctgtttctggaaaatgacgtgtcctggcagggaaggcatgtcttagtctctgccatacgttagcagtgaggcctgagaactaatgtcataaatttgctagaaaggaatcaaagaaggccaaaaatcaggcatttttatttctccaaagatctatgaagttttaggcataaataatatgcaggtgggaaaatctggtcaggtgatatgtcagggaaagccaatggtaaagaataagtatgaaaatagcctctactttttttttttttttaaatagagatggggtctctatgttgcccaggctgaactcaaactcctggactcaagcaatcctcccacctcagcctcccagagtgctgggattttaggcgtgagccactgcacccatcccaatagcctctacttttagttttgcccggactcctttatttcagcacttttatcttgtgccagctgctgtttttagagctcccctacaaagttcatactattattccagttttacagatgagactcagaataaacttccttgccaaggttgtacagctagtgagtggcagagccaaaacctatgcttgggtctgttagagtccaatgcttgagaggatatggttccatttccgattgctgtaatgaattatcccaaatgccccagcacaaatatattacagttctgaagcctgtaggtcaaaaatgggtcagcttctagaagctgtaggggagaatctatttccttcttttctctggtatccagaggtcacctacattccttggcttgtggctccattctccagcttccagtccagcagtgtagcatctttaagcctctctctctttgtgacatctgctcccataatcacaccttttcctactccaacccttctgcctccctctcatgaagacccttgtgatcacactgggtccacctggataatccaggataatatcatcatctcacattccttagtcacatctgccaagtccttttgccatgtaaggtcacatactcataggtgctgaagattagatgtgagcatttgatgggaggaagggcaccgtgccttgtgctggactcttagctataatactctgtggtctcatacatgaagaaattgcataagtaagttgcactccctagtgtatgcactctcagtggggatggtattaatcccaagagggcgaaaatggttctatgggagaggatgaacaaaactcattctttttacgtatagagcacagatacagtacatacacagatacacgtcagtgatattacaatttcatgaatgggatgcgcttagctcttaatgcattacctcgtctagtcctggatgtcacctgcgaggccaacgtgtcatctcacttgcccacctgccttctttgccctggccgtccacgctctgcctccccttgcgtccctccccaacacctcagctctgcttgagtgagaagatgactctggggtcccccttgagaacatatgtgccttttaaaactatgtttttgttattgaagaacaaatgttaactaaatcacatcagcattagctgcactctcacagagcttggttttatgctaatactggccatctatctctttaggtgggtcttttgcaaagaaacaaactagaaaacaactatattctcaaggtggtaaaaagcctttttaggtatttccttcccagaatctctaggcttaggctttctcttctctttttagcttttgagtgaaaaaggtaaggagcagccgtcattctcctttcttattggtgggaaagtgattgttgcatattaataggggttgtggcacctccgtggtaatgtttcactaaatggaacagcatattctctttctaggatgattaattttgtgtggcctgacagtggtgtgtgggactaaatgttctgtcctttctaactgcctgatctctgagccatgggagattgagtttctccttcacaatccaccaaagtttgcatgtgaacaaaacaggggatctctgtacgcaacaggagggtgatgtgctcaactgtgaagtgtggtcctacttgaagttgtctgattcaatgagatgcaataaattaacataccacatgtattggggggaggtgaagaggtaccagatgacagtctcctgaggtctccctctcttgggcagtatatgggaggaatgggctgacaaaatagctaagagatgtcatctcttcacaaaacacctccccatcacattactttcttttgtgcagactcctcctgcccccagtgatgaatccagaggaagcaaaagaactggttgagcagaagacacccttctaacatagcaaatgatctttccccccattctttattgaatttattttttttctttagttgatgtgagctgcttttgactatgctggttttttttttgtttgttgttgttgttgttgttgttgttgttgagatgaggtctctgtctgtctcctaggctggagtgccgtggcacgatcttggctcactgcaacctctgcctccctgggttcaagagattctccttcctcaacctccagagtagctgggattacagacgtgtgtcaccacgcccagctaatttttgtatttttagtagagacggggtttcaccacgttggccaggctggtctcaaactcccaacctcaggtgatccacctgtctcggcctccaaaagtgctgggattacacgcgtgagccactgcacccagccaactatgctgatttttaaaaaacttcattgtaccttaacagcatttacaaaaatcagatttatctgattgaagtataattcacatacaataaaatccaccaactttaatagcacaattcagtgcattttgacaaaatatgcagtcatgtagcctccaccatgatgaaggtataaagcttctccatcattgcaaagtttctcgatgcccctctgcagtgagtgtctcaaccagccccagcccctagcaaccactgatctactttctgtcactacatttgtgccctttctagaattttatataagtggaatcatgtagtatgttgccttttgtgtctggcttctttttcgtagtataataatgttgagattcatccatgctgttgcattgatcagtagttccttcttatttattgctaaggagtataccatctgctatagcctgaatgtgtcccccaaaattcatatgttgaaacttagttaccatgtgatcatattaagaggtgaggccttaaggaggtgattgagtttagagggcaaagaccacataaatggaattatagactttataaacggacttgagggaactagttagtccctttcctgcccttctgtcgtgtctgccatctgaggacacagcattcctcccctctggtgggcacagcaaggcgccatcttggaagtagagaacagggccctcaccagacactgaacctgctggtgctttgatcctggacttcccagcctctagaactaagagaaaaaaatttctactttttataaattaccagatctatggcattttgttatagcagtacaaacagattacgagaccattgtacggatataccctaattggattatccgttcttctaatgatagatattttgctctaataattctcaagatatttttgggttcaaataaaacaactatttgaaaaggatggagacaaattgaggatactaatttaaacaattgcattttggcagaacaagcacataagcctctcacccaaagtttgcaagcaaatgtgtttgtcttagtggcattgcaggtaaatcacatggtatgttgttttaacatcattagcaacctactccaaaacgggacactcaaataacatctaaaattggtgagttaagctagaaatataacataagcaaaaactgagacattttgattttttaatatattgttacttaagatgaataataataccaaacttttgagaaagatctccaatccacatggattgtattacttaatgtttgtttgatatcaaattcccatggtggtttgctcttactaagaaaaagcactctacacgatacatttctttctaggaggatacagaatgtaatttcatgttttagtttaaaagaggtattttccctgattgatatctctcacattgtatcgaaagacaaataaaagacttacaaggcataagggatgtaggaaagactagttttaacttttgatcttaaagttccaaaagatatgttaggcagaaataatacagttaacttcaaatagcaatggcagtctttatgtcaattgacattaaatccaagacagaataactttccttatgtgtttaccacatgccagacactgttctgagagttttaggagtatcaacttatttaaaccgtacaataacttagaagctttggtcctatcattattataattcccattttacagatgacagaacaaagaagctcagaaacctgcccaagctcacatattggagccatgattcaatgtagcattccagcctctttggctgtttgcttagccatggtaccattgctgcttctaaataagccttcataggaaatattattggatgccaatggtattagtctgttctcaggctactaataaagacatacctgagactgggtaatttataaaggaaagaggtttaatggacttacagctccacatggctggggagacctcacaatcatggcagatgacgaaggaagagcaaagggatgtcttacatggcagcaggcaagagagcatatgcagtggaactcccttttataaaaccatcaaatctcgtgagacttattcactatcatgagaacagcatgggaaaaacatgcccctatgattcaattacctcctactgggtccctcccatgacacgtggggattatgggagctacagttcaagatgagatttgggtggggacagagccaaaccgtatcaccaatgaattgttttaattgtaatttttgtaagtaggaaaagtatagataaaaagaaaccaaacagtcaactagatttctatttacatatttttccaatgacttttctatacctctatacatatatgtatacaccaatagagatcaatagaaatgtgcatcaaaagacatggtcaaataattctctctgaaggacaagaaagggtcacccagaatttcacttttataccccttaaaactgcactgaaaattataacttagctaataaccttaggaaaactgcatgaggacaacaataagcttaaaaggggtaatcactctaaagcaagtttcacaggttgaagatgtcaatgaataacaggcaaaattgctacctcgggattaactgggactctttacaaactctccagcagtagctgaggatgttgacagcaagactgccaggtgtgagggcgaggtacaaataacccatgactcagaaatgtgtgtttcttttccctcgtcatgtgcaggtgttcacacggcaactgctgtctcagactgttgtcctacgtttcaagagaaacctatttccctccttttgggaacatctttgtaatatacatacatatatatgaaatatgcatatatatatgtatatctcaaatatgtgcatacatgtatgtgagacatacacatatatgagatatacctatgcatatgtgtatctcatatatgttaacacacatgcataatatataaaaaacataaatatattacaggtgagagaggaaagaaaagagaaagtgagatggaggatggagagaaggatagagaagaggctttctcaatcccaacaatttttccctattcattccttgcccttgcactccatattaaacataagaagataattgaaaacaaacaacccgattaaaaattgggacaaaatgagaatgtaaactggcgtagtcattatgggaaatagtatggaagttcctaagaaagttaaaaaataaaactactatattagtctgtttttcacactgctgataaagacatatctgagactaggaagaaaaagaggttgaattggacttacagatccatatggctggggaggcctcagaatcatggcgggaggtgaaaggtacttcttacatggtggtggcaagagaaaatgaggatgatgcaaaagtggaaacctccgataaaaccatcagatctcatgagacttattcactaccatgaaaacagtatgggggaaactgcccccatgattaaaattatctcccactgggtccctcccacaacacatgggaattatgggagtacaattaaaaatgagatttgggtggggacacagagcaaaaccatatcaactaccatatgattcagcaatccacttctgggtatatctaaaaaagtgaaagaagggtctcaaagtggtagctgtagccccaggttcattgcagcattattcacaatagccaagatatgggaatgacctatgtgtccatcagtggatgaatggaaaaaggaaatatatatatggacacacacatatacatatacatgtgtgtaaatacacacacacaacagaatagttattcaatcatacaaaagaaggaaatattggcatttgaaacaacatggatgaacctggaggactttaggataagtgaaataagctagacacagaaagacaaatactatatgatctcacttttatgtggaatctaaaaaagttgaattcatagaagcagagagtaaaatggtgattatcaggggctaaggtccagggaaaattttggtcaaaaggtacatactttcactcataagatgaataagttgcatggtaaatataagttaataatactgttttgcttacttgaaatttgctaagagtagattgtaagggtcctcaccacaccctacaacaaaaacaaaaaagtagctatgtatggtggtggatgtgttgaatatatatatacacatacacacacacacacacaccatggaatactactcaaccataaaaataacaaaataatgtcttttgcagcaacgtggatggaactggaggccattatcctaagtgaagcaacttaaggacagaaaccaaatactgcatgttctcacttgaaagtgggagctaagccatgtgtataccggggcgtagggtagcataatggatattggagactccaaagaagggagggtgggagtggaatgagggtgaaagttacttattgggtacaatgtatactactcaggtgacaggtacattaaaagcccagactttgccactatataatcacatccatgtaaccaaaaaccacttgtaccctaaagctatgatttttttttaaaagaaccttctacagagcccccaatagttcaggttctcagtccccaactttagggtattctgaatagcagctacgggatgagactagggcatggaatttttaatacattccctaggaaattctaaaagctttggaaccaatgctgtaatatacctccttcattactcaggaaaggaaactgaagcccagaatcttacatgtgaaagaaaacaaccataaccataatatgataatgataggagcacttattatcagtcaggcactgtaatatgtgctttcattatatcagatgcttatgctataagtactgtcattattcccactgtacagatgaggagccagaggttcagagaggttatgtaacttgctcaaggtcacacagctagtacgtggcaaagctagcaatctgattgcagaattcttaccctcaactactgggctatactacctcttcttacataatttatatgtatccgtcacatagtagagcctgaccaccctggaagcattgaatatacagtcttatactccaggataaagtcaaataggtaagtatatgcctcagttttaacactgccctcatgtggacacaattctgttgtcttttataatttatcagcttctgaggaattcctaagtgctgataatggcagaggctgtgcacatttggggaaaaggaatatatgaaatatcgctggagactatgttaaatgtttaataaacaacctcctttaatcctgatagcaattctgtgaggtaggtacttttatccccattttacagatgagaaaactgaggctgagaaaagcagatgccttgttccaggtcacacagccagtaatctgcagggcagagattgcaacctaggtctgccaagcttcatgttttcactctattgcttttatcttatctgctgtaactcctcagtctcctccagctgtcacacacactcagaagagatctgttgttatggctgaatcatattgcccccaaagatgctgaagtcctaaccccctgtgaatgtgaccttatttggaaacaggatctttgcagatgatcaagttaagatgaggttattagggtgggccctaatccaacatgactgcttccatatgatgaaggggaaatttagacatgcatagagggaagatgacatgaagatgcagggaggagatggccatatctacaagccaatgagaggggcgtggaacacgttctccctgatgacccgcagaaggaaccaattctgctgacaactttattttgaacttttggccttcagcactgtgagacaatacatttctgttgcttaagccaccagggcatggtagcccaaggaacaaacgcaagtattttcaaactgagcctgcggcttcgaccctttcatttttttttttttttcaccgtaaacagcatctgcagaccccccttccccacgagagggtagatgcccttcccagagtagcactgaccttcctctaagtgctgaactgtgtgggtcgacaccaccactggaaccccgttcagagcagacgcgttgtcctgaaacagagcacgtggcattgtgagacaaatcttcgggggaaaatcagaagaactcaaggaagaacctctaagatacaagggtgtctcacaaaaaattaaacttaacttaaaggctgtgtttctagaaactccccagttttctatcatgccttggagaaccaaaataactcactccaagagtggactccagttattatgagagcacaccatggtgcctcagctcaggggaccccacactcacaggaagctctgacccgtcgcacggaggggaccccaggctcaaatgggcatttgtcaagtcagggctggagcacgaatttaatatgctgattctgacaccttttaggttatcctcgctccactgtcttgcacacacagacacaatcaatcagcagccaggacttcagtcaacacacttgtcaaatacaggaagttcttttttttttttttttttttctgctgatgcccctgtaatggttactacactacctggtaagtctctgcttctggttcattctcttggtcttcaactctttggggaacactcatttggttacccattgctcctataatggagagaaagagaggaagagagaaagaaatcaaaaccaaacgaagctacatgtgctactaaggtgcagaggcctgacaagccgcccatggctgtattatcatcagctgagatcagaacaaattgcttgtattagtccgttctcacactgctatgaagaaatacccgagactgggtaatttataaagaaaagaggttgaattgactcatggttccgcatggctggggagaccgcaggaaacttacaatcgtggcagaagacacctctccacaggacaccagaagaatgagtgcgagctggggaaatgccagatgcttataaaaccatcagatctcgcgagactcactcagtatcacgagaacagcgtggaggaacccgcccccatgatccaattacctccacctggtcccatccttgacgtggggattatgaggattacaattcaaggtaagattttacgtagagacacaaccaaactatatcattgcttatatttattttgggaaatagaaaggagattttggactcatgtattcaacagaattaaagttaaatgcagtcataattttcagttgcatttcattgctaggggaaaatatttatcatcatgaaaagtgtattcagtgtagatagcatttttttctcttttagttaaagtcacagctattaggattttagaatgagggtaattgaaataataatatttttttctgattctcaaactaaattaattcccctattaaaaccttttacactacggccttttttttttcatagcatttagcagggcttgtaattatatacttacttgggtatatattcatgctttcactgatttagcacatatggtcatgtgtcacttaagggcgagaaaatgttctgagaaatgcatcattagatgatttcatggttgtatgaacatcatagatagtatagcctactacactcctaggctgtatggtataacctatcgttcctaggccactaacttgcacagcacgcaaccacattgaacactctgggaaattgtgacacactgggaagtatttgtgtacctaaacatatcgaaacagaaaaagtccagtaaatacatagtattataatgtcatgtgaccactaagtatatgtggtccatcattgactaaggtatcattatgcagtgtatgactgtgtctattgagcacagctctgcacctgttgctgggctgggcactagggttacagctgtaaattaaacaggcaaggccctctgacttcatggagctgaagtatggtgcacagggagagagttaacataggaacaataaatccacaaacgaggttgtttctgatagttcaaggcagcatggcacagtggttatgaccacagactctagagcaagactgcctgggcatgaatcctctctctgccccttgtagctgtgtgtccttgggagagttaattagcctctctgtgcctcataagactgctataaggacccaatgagttaatgcttgtgacgtggttagaacaatgtctagctcatgttaagcaaaacatatctgcttattaaacaaaaatgcatagggttctaagttatgaataaaagtaatttttttttgagacggagtctctctctgttgcccaggatggagtgcagtggtgcaatctcggctcactgcaacctccgccttctgggtttaagcaattctcctgcctcagcctcctgagtagctgggataacaggtgcgtggcacaacaccagactatttttttttttttttgtatttttagtagagatgggttttcaccatgttggccagactggtctcgagtgcctggcctcatgtgatccacccgccttggcctcccaaagtgttgggattacaggcatgagccactgcgcctggtcgaataaaagtaattaataacattacgtgagatgggatcatatgggagatggcaggttgtggcactgctgggtaggatggttctgaaatgactgttaatgtggttattgtcccataggtgaagggcaaagttgaatatttaatttatgtctcccttccacaagaaattgtaagcaccctgacgtcaaaggcagtgtctaccttcacccaattttgtatctcctaatcttagcagtgtgtttgcatttactgggagcttaattattgttagtcaatggagggaataacgattgatagcatctctcacatatgaggcacagacctaggtacatgaccacatcatcaccaaacctctgaagagcttcgttataataatgtatgatatataataataatgatgataatagcaaatcattacttagcatgttctcaattccaagctctaattttggagtgcttcacctgtattgtctcatgtagtcctatagcactcctgtgagatagaggtatcatgatttcattcttcatatgaggtagccgaaactcgagggggttaaatcattttccaaaggtcacccagttaatgagcaagattcaaacacagtctggctgtgctcctaaccaccggaatgttctgcatattactagcttcccttaaaaaggaggaatggaacctccaagacccaccaagggcaaacatccagtgaggaattgactcctagtatatctgatccctacacaaggactcttgcagccactccaaaggcctgctgtcttgccacctaaagttcttttgcacatgtaattccaatgtagcccatctccaaagacctagcttctggcttatctgctctagtggctctcggaataaaaattaggacttttgatttctggctgaaaggagtcaatgagtcaccagggattcttgtggatctctcgccattggtgtgagtttttattccctggtagtagacgcattgagcaattagatattgaggaggccaaaaaaagggtcatggatctcaccatgtgttctcttgcaggaatttaatacataaccaaatctggggattttgtatgtcttctgatcataccacataataaagctgagcactgttaaaacatgtaggacacttgttgttttgtgctattttctatttataaaatccgtgactcacacacttgcatcagatcatcgcttctgtctgttaatgggacattatgaataatataatattgaatcctcaagaccagggttggcaaagaacagcggtggctggattcagctcactgcctgttttagtaggccagtgagctaaaaatgagttttaaatttataaatggttggaaaaaaattagaagaatcatagaatgtgacacatgaaaattatatgaaagtcaaattttggcatccataaataaagttttgctggaagatagtcatgcccttttatttatatattgtctatgatggctttcatgctataatggcagaactgagtagttgcaacagacacctatggcctgcaaagcctaagatatttactatctggctctttacagaaagtttaccaggatttgagcctactgtgtataaaaacaatgacaacaactctaaaaaatcatagaaatgatagagtaataacaataacaacatttggtgagtgcttaccatctgttgagaaacttctaggagctttatttgcagtaaaactaatttgctctttgcagcaattcaacaagacagaggtattattatttcaattttgctggtgtggaaactgaggcacgcaggttaaatgtctcagtcaaggatacgcgcaaacacatacgttcatatatacacatgcaagaatatatacacacaaagtatctctatctaaattcagcttttaacaagttttaaaattattttaacagtaggattacaagctttattttaaagctcttactatttaatgtaaattcaatcctaacaaagctactttgaatcaacacttgaggttatgaaaaaccttggtgctggaagacgcatggtgtacagaagtaggagagaagatttttcttcccacagagttggggttacattattctgatcattgcacaccctaagtagcctctcggccacttcaaggtgaagggccctgaaagaaggaaaatctaatggcgtgtctttttcagtgataacctggattcagatattgtcactctccaccagcagatataatgcatgtgtcgtgaaattgctcctgcctgtccatcaaccttttaaagaacaggattcatctgggtgggacaaaagcaaaaggttactgccatctattggctgatgtcaatattagcagaaatgaattcagcctacaggactaggtccaaacaactgggaaggctgaaagaagcattttgatgttttgcaatgaagccttctgttcacagttggcaagaagatggcaactccttcagtgccccaaaggtcctggaactcgtaataatgataaccatatatgacttgtatggagagcttgccgtatgccagcccagtgctgaagctctatgtagacatcagtgtagcacataggataggaatgtgggctctggagtttggaatccctgagcatcactgagcctcgctgggcctcagtttcctcatctgtaaaaatggggataattatagcctccatctcaaggggctggtatggagtcaaaccagtgaatataagcaaagtgccctgaacagggcctggcacataaagaggactgcacaagagttagcatgagtaggactctcacgggtatgatccttgctctttgaagccagtttctcccacaggtgcccggtagtgagactctaccgaggaatccagcaacatttctgattcctgtgatcctctcaccgaaaagtcaatttggggccctggaatttgtatttttagcaaatgccccagtgattctcatgatcagacacctatagaaaatagtgtgatggtgaccatcttcaagctttttccaggagtgaggatgctctaggacacaggactcttatgttaaaattggaaaaccctgggcaaaccagaatgacttgggtggagacttttttttaaatccccgtttaatagatgggaaaactgaggctcaaggcagttcagacagtaattcttgtctgtaatagttttctcccatttctcaaaaaggagaaaaataaatcagatagagtttttcatgataaacgtacaattgaaagagctaactttcatttttgaaaaagaaaaagtttgaatggggtgttaaaatgccctttctttcatgaactgattatatgagtgttttgtctttatgaccttattttacattaaacatacgaagctatggtgggtggaggggtgttgtttttgaaattagacttgtgtttgagggtttggcactttgccactgggggttgattgtggaggttcagatgagaaagccccttcacttccccgcctcctgcctgtgttatgggggcccatgcccagactgggctgcatgtgagaacctcccacagagttctgagatccccatgcccaggcccctgccaaactgatgacagcagattctctggggtggggctgggcatcggggtactttcaagatctctaggtgatttccatggctgagagcccctgttttggatatttctggggtgagtgagtgagtgtctcctggggtcagaactctcctggctgctgcctaccctgacctagacaaccaaacccacggattctcagacggaggaatagctcaggcttcggagtccacagaccaccatcacccaggcacctgaatacactcacaacccttctaggggcactgctttgctgacgcactgtttcgtgagcttgcaaatcaagagaactgtcctgggcctccagcttcccttcccccagaactggcgggcagggcaggctttccagctggttattcagaagcaagcccagatgccccaccggaggtgggtggaggctgccctccgcagtctcgctctcctgcatctctggggttcccctctctcctcttgagaacaagagatctggagtgagacaggcatccgtaaaatcccacgatcgtgaggctttgggcaaagcacttgacccttctgaaagtatctttcttgtggaaaatgacagtattcataatggtggcaataataaacacatttagagtgttttctctgtgctgagcagttctgatttgcatatatttgcctctcttggtcctcccaacaactctctgagttaggtacttttattttcccagttgtcttatgagaagccggagcacagagaggttgagtggcatgtcctgatacatcgtggtaccgtgcgaaggggtaaatgtgatgggaaagtgcctggcagggcgagcacctagtagctattagtgatatagatgtcccaaactcaactcatgatggttcgactgacaatatttcaactttatgatgagtatctatctatcatctatctatctatctatctatctatctatctatctatctatctatctatcatctactttatctatctatctcacacacactatatatataacatatttacaatgtttagggtattttattttggtaccaattttccaggactatatatctatatttcatattttggatatcttgtcctattcctcgatgacttacattgctttgctaaacgttttctccttggaaatatgctgttctttgtttctccctcacaataagtggagcacagcgtttctggagtcaggagcgattttggccccgaaggggcatttggaaatgcctgcatgcagttttgatagtcacggttcagctttggggggcgtgcactggtatccggtgggtagaggctggggacgctgctacataccctgcaatgccaaggaccgcccccttcccccagcgaagaattgtctgctttgctgagggtcgctagtgctgatattgaggggccctgctctagtgcctggacttggggatgttctcctcgtgtttgtagccaggtgtcacctagggatctgcatttctgaaaagcacgtgagtaaattcgtctgtggtggtgaaatagcgcaagccctctgcctgggctcccctctggctcaccctggccatatgcataagccctggctccgtgtctgagaagtgaggggtggagggaaggaccataatagattccttgcgtggagctcctgtgaagattagaagggtgtggcccatgtgttgtataactgggtggctggtgcacagcagctgaggaatagagataagctgttagtataagcagtaaataaaatggaccatacattagcagtagtaatacctaatatttttgtagcgcctaccttatgccagccattgctctgaatgcttctctgtgttaactcacagcttccttatcagaacccgatgaggcaggtattttttttctttttttttttttgaggcgaagtctggctctgtcgcccaggctggagtgcagtggcgccatttcggctcactgcaagctccgtctcccgggttcacaccattctcctgcctcagtctcccgagtagctgggactacaggcgcctgccaccacgcccggctaattttttgtatttttggtagagacggggtttccccgtgttagccaggatggtctcgatctcctgacctcgtgatccgcccgccttggcctcccaaagtgctgggattacaggcgtgagccaccgggcccggccgaggcaggtatttttattgtccccattttacagatgcagaacctgagcccagggaacttaaactcctcacttaagatcatgctatggattgaaatgtgtccttccaaaattcgtgttggattcgtgttgaagccctaacgtgcaatatgactgcatttggaaatgtggcctctaaggaatcaaggctaaatgaaatcagaagggtggaccttgatctgatagaattagtgtcattataaaaagagacaccaaagagctctctctgtctctctctcaaccgtgtgaggacacagcaagaaggcagctgttggctagccagaaagagtggtctcaccagaaatgcatcggccagaaccttgatcttggacttccagcctccagaactatgagaaaacaaaaatgactgttgtttaagccacctagtctgtggtgttttggttaccacagcccaagctgactaatacagatcatcttctagtaagtgggagaatgaggacttaaccctcgcaaactcaagtccagagtttagacttttaacttttctattttcatactttctactgtctcttctgctgtataagtgatgttatagttttatgaaatatttatatgtaatataatagaacatggaatagaaaatatttcctgcatattcattcttgcaatgagaaaattataactaggcaaggaatatatatggtacaatctaaagtgaggattaggccgggcgctgtggctcatgcctgtaatcccagcagtttgggaggctgaggtgggtggatcacttgaggtcaggtgtttgagaccatcctggccaacatggcgcaaccctgtctctactaaaaatacaaaaattagccagatgtggaggcacaatgcctgtaatcccagctacttgggaggctgaggcaggagaatcgcttgaacccaggaagcggaggttgcagtgagccgagatcacaccgctgcactccagcctgagcgacagaatgaaactctctcaataagtaaataaataaatcaaataaagtgaggattgaacaattgaagggtcactgataatcactgtaaggatttagcgccagggcttggcagtactcaggtgagtaaacgttagttattgctaatattattcatttatcttattattgttataattgagttagttctgtgttctgatccatgagtgaattggcctcctggaagctgccctcaaatccctcctcttttacacagtgattgatggtccatgtcgcctccttgtagttacagattaataataggccctcctcctggaaacaggccaaacgccaaaccccatgcaagctggcctggagaaagcacttctgaaacttcatcaccagcaggcagctagacgactgttgaatgggagggggggtggttttgaagggtggaatggtgacagaattagtcaccaagtaaacaagcaacaccttcgatcaatgcaatggaatgtaggtaacccaggggccctcctcactgctcagctgagggtgacgccaacatggccaggctggcacacccagcagaaccagccctctgcccccaacatcagtaaagaccttgcaggaggaaagaacaaccccgctttgcctgccccacagtcctgcagctccatgtgtgtgcccgcacagtgctaggaacacggcagctattatcaggagtgccaggtacagtgctacaggttgcctcctgtacaaggggacacagggaactgaaatccagtcctcactgaactgcccaagccctgattcctggtatgggactttgtgggtccaggggcaggggtgccttgatcaaaatcaccttggatgttttagggctgcttggtgattgatgttttgctttcggagtacttaattatgtttgcacaaacggatggtaatcctaaaaatcttagagctcgctctcatagtcttattattgcaccaaacattgttaagtgcatgataatcgcaggtaattttaattggaggcttactatgtgccaggcagcaccagggtgagcatagcaggacacaaaatataggaaggcaaccatctctggtgcagaatcggcagcagagagtgagcgcctccctgcattttatcccccaggtgctcactggcttcacccttgccctgaccctggtgccaggcacttcacacacattgtctccttttcccttgcagagtcccattattccctgattgcacagataaagaaaccaaggctgagcaatgccatcccctcatctcacgaacgtcacctccatgagggtaggcaccttactagtcctacttgcccaagagtagcagtcagaaagctacggggaggcacacctggggtttgaacctgggtccacgtgactcaggcactcaaatcctgaactgcttcagggcagggcacttggcttgaagagaagctgcagacacagagacaatcaagtcacatctaatactccagcaggacagatgagcctgcaaggtgcaaaggtacccccgcccccaacccaaagcctttttcaattcctctccctccacatctcttgtcatggtaaagcaggcagaatccatgggctttaacgggcccattgcttttcccaaagctcatgcctttttcctaaaaacaaaacccttctgggttccagaactctttggaaaaaaagaatcttctgtgatttgggacattggtttgttcccccaccctcacttaaatgagaaactactttagcatgccccgccccgtctgttgtctttatttaggaggaagcaccctctacataccctgagtatatacacccagggcctgaagctgctgtgatcagctcaggatccccaggaggctgaggcggatcaggccctggactccgggggaacaatgtaagggacaccaaaaagctcagccatggagatgaatagtattttaacatgaaatttgtgaaaatcaaaattaccgctgttcctgatcttatctttctgtaacatgttcatagtttgttcatcacgggtgtcttgccattaattctgacttttaaaaatgttgtgttaacataccgtttatctccatgactgagttttttggcatcccttacatttcgtgcccaaggtgagagtctcactggctgcaccctcatcccaggcccgactggactccagttccacagcatcctttccatgagacctggaaccagatgcagctccctcttcacccagcttcatgttcctagttgtaaaatggagacgatggtaacagcgaaaacaagaaccacagctaagagttactaagtgcacaggtatttacgggcagtagagtcctctcagccctttgatctcagtactgttattaggttcactttacagatgaggaaactgaggcccagagggctgagggaacctgctccagggcacccagccagcccagggtggagctggggctggcatctggcggtgtggctgcagcgcacccgcattctaatcgcaatgactcttccaggcaggaaactggttcagagggagatgtaaacagcaggggtcctgaagccaggatttgaatcagcagctgcctcatagggtggtcttgagcgttaaataagattcacaaaaggcactccacaagtcctttttcttgtcctcccacttctttaggcaatgcctgaggtgaaggctcagattccactcggctatggggcattcttgccctgacggatccccaaatcacacagcctatccctccatccagtgacttctccccatgtcctgtgcttgaaatgaccctcaatagttccaccaaataggagttatttatgtggctatgcgcctaacactgaccacattgtcatttgctccttgtaaaactaaaaactttgagatgagtgctatctttgggtccatttcacagatagtggaactgaggcttacacatatccaaggccacacagtgaacagaaggcagagctgggatcaaacttgaccctgtctgacccctggcctctatatgacaccgtctaccacaaacagcaaaccctccagccatgcctaaaggatctgaaagcagttacctgctgagcccctgtgggagtatcttcagtcccctcgtgtcacccggagctgctcctgcacagggtcctgggtctccagtgcgtgctgcccagtgcctggctgtcggtggagcctggctccctgcactttgcttccttgtgcagagcctgctggctgaatacacagagcagggcaaacacaagcctgggtggagtcctcccttctccccggaccatcctgcagaaacaggttctcttcctgatgtggggctgccctcccaactccaataaaaactgagcacctgactcctctcgcattaatgcctccctggcaccccaagtattctacccagtgcccctcacctactgaggctgccgggttgacctggggaagcagtttccttccccagtaaccgtaggtcatggtcagagcagggaaaacacgttctgtgagattttgtagttctgtctgctgacttcagaacaccacctccaccaccacctaaccacctaattggaaggaaatagcttctcatccactcaactacccctagtcatgtaaaccttattcccaaaggggtttggacaccagaaatcaggtaacctgagggtggtttattgctctggagacataccatgatgttggaaagggcattctttttctttgcaggccagaaattcgacaggctatgcaatttatttaattcaagcaaggatgttgtttaaagtgtcttacaaggacatatacaatagattatgagagcatgaaataacatgtaacaaaagaagattgaagaacaaaatttggaacatcaaatgagaacaggatcaaaaataaatgctcttgttgatttacagacttgctatgaagggtttgcagatatggctttgagcttcctaacagccaatgcaagaaaggaaacttgataagttacactacttagtgctctggagaagacattcaagagaattgcgaccaataattattgtggttttattcaacagtatactcagcttaacccctatcatgaatacttgtcaagcaccaggctatatatataagccagagtttaaagaggtgagtaaaagatgctgggtctctacccttcttgcactcagtgtcattggacatagaatcctgtaaatataaacatagaattacagggtgtgattctcattataaaagaaaagccaaggcagctaagggagagaaatagagagagctggggaaggcctctttcagaaatcaacatttaagaaaaaaaatactatttaaataaatgctgaatacacaaccaggcacaccgtaattagggttgtaaagtcgattccagctcagcactgtacatgtcaatctggaatgtagtaaacccaattattaagcagctgccatgcacacgctctgtgctgacccaagcctggaggctcaggagcttgagctctggccctgggttgagacagacaagggctcggatcttgattcttactgatcggctgtggaattatgagcaagctactgtacttccctaagtctctgtcagccccctcagctgtgtgctcctttgtgtttattttgcatctattcttgtatccccaactcctggcaccctgcaaaacgaggatggggatccctctatgatagagtaggtactctgcaactcctggctgattggacttgttcattctttttttttttttttttaagacggagtcttgctttgtcatccagactggagtgcagtggtgttatctcggctcactgcaacctctgcctcccaggttcaagcaattctgttgcctcagcctcctaagtagctgggactacaggtgtgcaccaccatgcctggctaatttttgtatttttagtagaggtggggtttctccatgttggccaggctggtctggaactcctgacctcaagtgatccacccgcctcagtctcccaaagtgctgggattataggcgtgagctaacactccccattgtcttgctctcttttaaattatacatggcagtaactgccatttggatggcattagtctttgcaaagccttttgtgtttatccgtccatttcatttatgtccacagtgaaattaagatcttttgctcccattttacagaagaaaaacataaggtttagggatatgagtgatttaggagattaagaaaaatcattcaggtgggggcactcagcagtgtgtctggcaaaacgtagaccatcaccaagcatcagctggtgtagtcaagggtgttgatgaaggatctggcaaactgtagaccatcaccaaggatcagctggtgtagtcaggagtggtgatgaagggtctggcaaactgtagaccatcaccaaagatcagctggtgtagtcaggagtggtgatgaaggatctggcaaactgtagatcatcaccaaggatcagctggtgtagtcaggagtggtgatgaagggtctggcaaactgtagaccatcatcaagcatcagctggtgtagtcaggagtggtgatgaaggatctggcaaactgtagatcatcaccaaggatcagctggtgtagtcaggagtggtgatgaagggtctggcaaactgtagaccatcaccaagcatcagctggtgtagtcaggagtggtgatgaaggatctggcaaactgtagatcattaccaaggatcagctggtgtagtcaggagtggtgatgaagggtctggcaaactgtagaccatcaccaagcatcagctggtgtagtcaggagtggtgatgaagggtctggcaaactgtagaccatcaccaagcatcagctggtgtagtcaggagtggtgatgaagggtctggcaaactgtagaccatcaccaagcatcagctggtgtagtcaggagtggtgatgaggcaggaccggctacataatctgctgaacccagtgcaaaacaaaaacgatgagccctttgttctaaaagcagggaaaagtaccgttaaaggtatgaaacataaagctgttttctctccttcctggtctctttctctacctgtcatgtattttacttattatttgaagtcattctaagggaagaaaaaataaaaatgtaagtgatcagcgtgagttttgccatccgtctttagatcaagccatgctggtttgaaatgcaatgaactcgagggcagaatcaccaaaatcatacgacttgtattttgtagttagttacggggcccccgtagtctgttctcactaaaacagtgtaaacgctgcatagaagtcatcattcaactgtttttactctacctctggatactcacccattctactaatgctctctatcttcagtttattgatgaataaggaaaaatcaaaagaaaaagaaactctaagctgccctatatttctgtcttgctatgttatcattttcagcacaagtggttggcccttacagggaggtaacctgggtaagaaaggctaggataggattcttttgttgtttgtgtttcttagaatgtgctgccttttttctgtattgaagataatttctgatttgcgtggaaagcctggactcttggggtgtcagtgcctccacatactcaattgcagctgtaactcacatgtgttttacttgctttgaggcttactgaatagtcatgaactcactggcattctctgctcatgggcatcatggatgttatatgtgaataggtggcaatgaacagtagacttgcatattgcttgtatctcatgactatgcttcattgtctcatcagattttacttactcaacccaagttcaaagataacactacaactgacccttgaaccacaagggtttgaactgcatgagtccacttagacatggattttttcccttcttctgccacccctgagacaacaggaccaacccctcttcttcctcctcttcctcagcctatgcaatgtgaagatgacaaggaagaaaacctttatgatgatccatgtctacttaatgaatagtaaatatattttctcttccttatgatgtttcttagaatgcgttgtctttttaatgttcttaataccattttcttttctctagcttactttattgtaagaatgcaatatacaaatgtaatacatataacatagaaaacgtgttaatacataaaacatagaaaacatgtttatgttattagtaaggattctggtcaacagtagcttatgagtagttaagtttctgcaaagtcagaagttatacttgtattttcaactgcacaggattgatgcccctaatccccgtgatgttcaagggtcagctgtgttaagattttcaatatggcaactgtagagcaataaaccaagctcagggccctgggtggaggtagcaacaagtcttcaaaagtgcaaacttcttggtggaagaatttacttcccggtgtcgacaaagcagggagttcactaagagtaaagtttctccttgctacacagacttcaggtggtgctcaccatcatgctcccaacttggtttgcctcttaatcttctctctttacgatctccacccctcttcaaatattgacaagcacatgtggctgtcatctcctgttatcaaactgctttcctgaaaatctggatagagctggtttttgaatcaaaaagagtcattggaaaactgaaattggaaatctccccaggaccctctttcagacctgcccctgcctctctgcaaatattccgtcctccacccaggcttctcgctcatgctaagccatgttggctgtgtttttgatcactgaaccagcggaaggcatgacccagccattatagtgtggtcatgcacccagggcctgtcagtgacagctggtctcctgccagtcaggatgcccaccctgctccagctgagacaggaaatctgacatgcacctttgtctttctgtatgccacccatcacttggcatttttcagatcactttcttgtgctttatctgatatgctccttactataatcctatgacataagaagtatctatttgcctgaggaggaaacagtttcaatgaagaccaatgtcttatgctaaattaagccatgggctaacactgggggcagatctctcaagactaaactcagggtcagtcttggttaggaacccagggtctggcatcactcagcctgagacagaattttggtttcacagttgattcactgtgtgaccttgaggaggttgtttgccctttctgtgctttcgttttatgacctaaaaatggttctattggcagcacccaagttatagagttggtgtgggaattaaatgagataattcacagaaaatgcttagcacagtgcctggcacccagtatgcttaataaaatgacacagtcactaaggatagggttgggatttaaacacatagcatctgacctcaggacctgcactcttaacaactaaatttacacatgcatatgtaatatatatgcacacacatgcataaacatatcaacataattaaaggaaaataaaaaatagtaacaaaactcacaaataatctagaaaccccatgcaaactgcattgaatgtggattacttgaccatgcatctctgtttcaaatctctgattctttaggtcatattttaaaacttacacaacattttgagaactacgttggatgctttctcatggagaatgcatccagtgtagtgcatggagagagtctaatcctcctaatctagttgaagtgtgagaatatcatgcaataaacagaacacagttttgtattcacctctatccctgtccctggagataggatgggggtttactgctgtcatcggcaaagaccatacctgccatttcccctgattcaaaccatgttctccatcatgatatgctgtttactgacctctgtgagggggccagtgatgagcacagtggttaagagaaggccttggaattacaccccagtttgaactctggctcatacttctgtgctgtgcaaaatcaagcatgtgcaaaatcaagttgtgcaaaatcttcttactctaaaatagaaacaataacatctctcctgaggattgttttgaagataaaatggcatgaggaatgaaaacaccaagcccagatgctgacaaacactaagggctcaaccagaaataccggttattactgtaattggctatcattgagtctacagagatgtgtacaaccatgatgcagccatatattcagagagattaattttcgtcaccactattgggcacccctctttttttttttgagacggagtcttgctctgtcaccaagctggagtgcagcggtgcaatcttggctcactgtaacctttacctcccgggttcaagcgattctcctgcctcagcctcccgagtagctgggactataggtgtgcaccaccacgcccagctaatttttgtatttttagtagagatggggtttcaccatgttggccagaatggtcttgatctcttgacctcggggcacccttcttttattgcgaaaattgtgtcttatttatatttgtaacctaagtgcctacctgaatgccagcccaacgtcaatgttgcctcaatggctcatggcatgttgaatacaatatggtacctgccatatcagtcttaggtttagatctcagctctgcttcagctatgccatgtgaatgtgggcaaattccttaagctccctggaactgttttctcactgccaaatagggatgggacgtttaatgtatgggaaatgtctagcacacagcctggtacataacttgtgatgtacagcagcagaaggtaactgctgtttttcatcattattagtattattggagtataaaaaaagtaatatagaaaggaagaagccaagggtggtggttgaggcagagcaaggtctccccacctctgcactactgccatgtggggctggatcttcggtgctgtaggggctgtcctgtgcatcgtagggtgtttggagcattcctggtctctacccataggtgccaggagcatgtctccagttgccatgagaaaagatgtctctggacattgccaaatgactcctagggggcaaaagctttcccgttgagaaccactggggtagaaggatgggtgaaagtttggtagccactttgcagggggtgcacttcctctggaaagctgaaaattggcaaggataggaggcttggagtatggatgatagaaattccagagagagaaaagaggcagggaaatacatcatacgctctgggatcagcaggtgcccagtagttggaatataggatattattgcaatacttagtattatttttattgagaataaggctatgaatgtggccagggaaagagcttgggtatcatgctaggggtctgggctttatcctgaagggtcaccaaatatactgacactgtgaggaatttggggtagtgttgcttgataaaataatgaaattatgacacagctatagcacggatgaaccctgaagacactatgctaagtgaaatgaatcagacacaaaaagaaaaatattgtataattccacttatatgagaagacttaaattcatagagaaagaaaatagaatgttggttgtcaggggctgacagaaggggaatgggaacttactgtttaacgggtacagagtttagtttgggaagatgaaaaagttctggaaatggataatagtgatagttgcacagtatttagaatgtgcctaataccactaagacgtatatttaaaatggttaaaaagataaattttatgttccttatattctatcacaataaaaaatacaagtccagttaaatttgaattccagattcaacaataaataatttttttactctaagtatgtctcaaatactgcataagcatagcataagtatgtttcatgtacaatattggacatacttatacaaaaacaattattcattattgttgaaattcaaatatacttgaaattcaaatttaactgggtgtgctgtacttgtatttggtaaatttgccatccctaagttgggggcattgctgagggtggactagagggaagggaatggtggcaggcaagccacagaggatgcatttagccacaagtagcaggaaacgtgatggacagcagcttagaccaaaagagcatttccggtttaattaacaggaaatccacaggaaggtgcttccggggctggtgcagccgctcaacagtgtctttgaaactcaggttctttctgattttctcctctgccagactcaggtattcatctcatcaaagcaagaagaccacctcagctctagaaccacagtctccccctaacttcagctgcacggagcagggatagacacaaaagacctttccttcccagatattgttgaaaaaaaaaaaaaaagaaaagaaagaaagaaaagaaaaaatagaaactttttttttccttctgggagaaaaagcttttgagaaggcctcagacagagtaatcgacttctcttcatgcctcacttgtcagaactggatctcaccactcccattcgcaaaccagtccctgcaaagggtagtaggattgctgtaattggcttaggtcaggagtcaacaaactttttctggaaagatccagatagcaaatattttaggctttgtgggccaaatggtctctgtttcacactacaattctgccattgtagtgtgaaagcagtcaaaggcaaagtttaaatggatgtggctgtgtttcaataaaactttatttaaaaaaatacaggtggtgacataacaactaaactctaagagtctggacagaagccagacaaagaaagctgtggaaagaacattgaacttggagtcagccccgctcacctggtctgaactcttggctttgccttgtgtcctcaagtaacctacttctctctgaacctcagattcttcagctgcaaaatggggataataatattcacctactaaggttcttgtgggggaagtaggcaatggaagtgagtgtaaggagggaagagtagaaggagtccaacaataatctgagttttctgagctcaagaatgtcaatacaggcagggcacagtggctgacgcctgtaatcccaaccgaggcgggcagatcacctgaggtcaagagttcaagaccagcctggccaacatgatgaaaccctgtctctactaaaaatacaaaaattagccaggagtggtggcacacgcctgtaatcccagctactcaggaggctgaggcaggagaattgcttgaacccgggaggcggaggtttcagtgagcctagatcgcgccactgcactccagcctgtgcgacagagcgagactccatctaaaaaaaaaccaaaaaacaaaaaaaataaaaataaaaaaaaaagaagttcagtgataggtttcagattccacactgcaaccaactttgagcaactatcacttgccaggttttggtggtggtgtagaaactacctgcaattacccaaaaaggctgttcaaatacttctcccttttccagctacagacctgcaagaggctggagttgctttgtgtgcttcaaccaaaacaacatatggcaacagactgaatgcagaagcagatacaagaatccagctgtcttctattaaggcagacagtaaagagacttgcaaaaatgtaaaactaccattatttttgccctgttgtgttttggaacaaaacaaatagtttcgttgaaaaatttttagaaaaaaatcatttttcataaaaatgttatttatgttaaaatggaagggatttatttctttgagatgaaattatataaatttttaaaattcttagttttaatttttaatgtggtaaataggtatcgctcaatccacataaaaattctttgagatcttacataatttttaacagtgcaaagtgttctgagaaccagactttgaaaactgctttttattttttcattacaaatttattataaaacacacagaggataaaatttaaaataataatctataatcctgtcactaagaaatatcctcttttggtatttctttccttccgtatcaatatcatacctatattactcattgtgaaatactgtttcgaaagccggaattttttttttccatcatagatgtcacaaataaatttaaaataggggttgaggggtttaagtacctgagatgaattaactccctggccatattgggtatttaagtgtttgacaccttctgctattataaacatgacagatttcctagacttctcccttagaagcattttccagatgttaaagtattggatcaaacggtagtcacattttagaggcatttgatacatgtcgccaaattcctgttcaactggatggtcttccgtgaggccaggctgggtctccataactcagaattacatttggcacttccatggatgggtgaatggatggatgaatggatgaacaaacgtgtgaaagggatggtttctttgtacccacgttaaaattgggtgttaacagttaaattattttgtatttgcttaattttaaaaaggtgtctcattaggattgctgttgtaattttcatttccttcatgactgtgacattaaaagtgttgtctcatgttgactgaacatttgtctttatctcttgtcaaatgccaaagccattgattcttgacacccagttcctttcatcttctagcactcagcctccttgcagatcagttttccccattccaccaagtcagagataaaaggaaggggctgggggcaagagctttgtgatgagtcttctgtgatgttgctagagggaagtgtgttttttccaagtgaggattaattgccaacttttctttttttttttttttaagacagggtctcactctgtcacccaggctggagttcagtggcaacatcatggctcactgcagtctggacctcctgagctcaagccatcctcccactccaaccttccaggtagctgggactgcaggtgcacgccactacacctggattttttttttttttttcattttttgtagagatggcatccccctatgttgcccaggctggtctcgaactcctgggctctagtgattctcccacctatgcctcccaaagtgctgggattacaggcatgagccaccatacctggccaattgccaacgtttaataatcaggaaactttatataaaaatttaaagatctagtctctcatttgtcaattaaaaggtttggcaatattgtcacatcacagtcgcctgggtctaggcgttggcagccttttcaaagggacacttgtttcttagtttatgttggtttccgtcactccctccccgctggccccacatccattgcctatttatcctcaccctcgtgctgccatttttcttggagcaaatttataagaaccatgaactatttctaccaaaatatgaaaaaagaacactataagagatcccatgtcttcataagaatgcaaaagcatccttgtaaatgaaaagttacatatatttcacagaagtttgatgtatttaatataacataattataatatttaatataaacgtagttgcatatgcttaaaatacaaagtatgtctgtgttgaaaacaagtataattttttcatccaatacatactatgctcttagctggagagtttatgccctgatatttatcacatagcataggaagacccccatctctacaaatattgaaaaaaaaatttagccaggcatggtgctgcgtgcctatggttccagctactcgggaggctgaggctgggggtttgcatgaacccaggagctcgaggctgcagtgagccatgattgcaccattgcactccagcctaggcaacaaagcaagactctgtttaaaaaatatatatagatgattaattcccactttgaacaaacatacttcctgagtcttcctgacccctgcagacacttgagtttgtgagccctgacctggctgctaagcggtgtccgttggttttcctgttgcgcccggggtagaagtttgaagctgagcttcaagtgtttgtctttcccttgggagaaggagattttctagctcacctcacatagtgtgtagacatctgggttatcctcgcttctctagagaactatagctgagaaaatgagaagccatctctgaggagtaataacacacagtgctctgagaggttgaaacagaaactgaggaaaaaaaaccaagtttttcaaaggtggatttaaacatgatcagttttgccatatctgtgttttctctctcctactgcagggcttcccaaactttagttatacactgaagctttttttctcattcctcatgccatataaacgaaaacatattttctttaaattgactcacgatttcatttgaagtatctaaaatagacactgactatgactaccataagtggaaaattagtattatgtcccccaaataaaatgtaacattaaaaaataaacctgtaacaactgtaaagaaaggtcttacgttctagctagattctgttgcctgcctaagatccacacccaaggccagctcactctgttaaaaatatgttaaaggaattctagcatcgccgggcgcggtggctcatgcctgtaatcccagcgctttgggaggccgaggcaggcagatcatgaggtcaggagttcgagaccagcctggccaacatggtgaaaccccatgtctactaaagatacaaaaaattagccgggcgtggtagcacacgcctgtaattccagctacttgggagactgaggcaggagaatcagttgaatccgggaggtggaggttgcggtgagctgagatcgcaccattgcgctccagcttgggggataggggcaagactccatctcaaaaaaaaaaaaaaaaaaaaaaaaaaaacaacaccagaaagaaattctggcatcaaactaaggctttctctttgatacatccagaagcattagttgataattgaaagaaaatggcaaagggaataactacctcaccttctcagttggtgactgaatagtattttaagttcactttatgcccagtgcaaacttttgtatcaccactggtaagcatttcataacttgtgaaacactatctgactgttattcatttattaattgaaaagaaaatatttttattactacttgtgttactccaccaaccagctactataccagcctctcactgattgaacaattaccacaccatgctatttttcttgttccctgacacaagtttttgaaccattcttgtatactatttttcaataattcctagttccccttttacagatgatgaaaataagacttagtgaagttaagaaacttagccaagcttcacacccagtaaatatagagttgaaattcaaatgaagtttggacattacttctaagagcttgaggttatctatccttcagatcaaccaccaaagttgatttgatttcacccctcaagccccaaggctcccacaacttaagaaacaaatgattctcctgtcagagaacaaggataaaaaactccagagaagtgctattttttccttagcaacaaggggagatatggttccagattcagaatcaatcacaaatgtgatttacatggaactgaatttttatccagaggaaacatatttacttagtaaatagaccatcttgaaggagggcaagagtccagaaataaaacaactttcattctgagtaagggaaaatgtggtgtgggccttcttctccagtgatagatgtacagaattttatggaccaattatagctgaagaagattaggtttctttgaattccacaagatgaaaggtcctgtcactcctttatcagctgccttctagaagtttccagccatttacctatctatcccttaaaccatccactcagccattcattcacttacctaccaacccattcattcaggtatgcaactaaccattcacccaacaactcactaatccatccttccactctccttccatccctttctccatgtatccactcctctctccatccatctgatcatcatccatccatccatccatccattcaatgatctacccatccatctatccattcatccatccatccattcatccaatcatccatccatccaccctacatccattcatccatccattcatgcatccaattatccattcaatcatccatccatctatcctaccatccatccaattatccatccatccatccatccatccattctttttgttctccaaacatttattaagcacacaccatgtgccaggccctgcattaagtactaagattataaaaggatacaaagataaaaagagtacaatttctatctgggctacagactaacagggagagaggtatgtataaagtgaaaagaatgtgcaaatagcaggaaataaagggggcatatgaggccaagaatgagacgtgctctctcagcctgaggtggggagtaaggctttctgaaagaagcatcttataaattgagagttgaataaaaaggtggcattggtcagatgaaagccagaggtctggcagggagaggaaagttgatttcaacacagccagccacatgtgcaaaggccgagcatccatagcgtttctaatggtacagtgctggaatatataagctctacattttgggttcttaagggattgtctcattcctgattgagcttcctgaattcagatccttgcttgggctctccctacctaaagacttggattttcatttgtgtttgcattcagatgttgactgaatcttggtcaatattgtcccagattgtttggtaccaggcctaaatgccacagtattactcagagcaattaacctttagtcgtcaacccaacatattcaccatacccctgttgaacaagagactgggcttttctccagctcatttctcctggcccaggctgcctactggcagacttgtaatgcagaattattttgcctgcagcaaatattatggaagctttcttggaggtctgaggttaaaccagtgcagagtttgctttttgcgtcttcttggcatcctcaatggggacatcatatgccccagcctttttctggtgaggctaaacattggaaaccaatatctgtttccttcacatttttacataggatacaacttcatagcatgttggcactcatcatttggaatagtaattcggtgggcaattcaaacctgtcactctcaaaatgttgtagtgcctgacactggatttgtttgtaaacttaagaaaaagtgtgttggaattggaagggctgtgtgactttgggcaagttacttagagtctctgggcctcagttttctccacctgtaatagtaggcacaataatatacctacctcatggaatttttacacaagttaatatttgaagtgttcagaacagttcctagaatacagcaagcatagaagtgtttgttaaatagaattaaaaaataggaaagaggtgtagagtagtgaaatccatttatgcctagtgttccatgattggaacactaagcatgtgggagttatctatatcctactgctcaaggtcattgccaaggtctgatttttcaattcaaaaaattgcaacttcaggcataaatgggttaaaagcaaaggtgcaggagccaggtagatttaggttctgatgtgaactctgccatcttctcactgtgtagccttgggaaagctaattaacctctctgacagtccagttgctgtgaaaatgaggctatgacagttcctccctcttaggatggtgtggggtttaaatgagataatgcacagcacgcgcttggcaaggtgctgtcataaaatatatggtggttgtttgcttctatgtcattattattcaacttaaggtctgagttggccagaatgaggaattatgaaatcacatttgcaagaggaaagtgaagccctgtccctgggaatcccagccgtctgcccttctcctgcatgtcctccagcatccactcagggataggaatctctgcaggtgggagaaggggcctcggttacttctgacaacggtcctgggccacaggtcctattgtccttactttataaacgtgggccctgaatgtttggtgacctgcctaaggtgacccaagcactacgtgacaaagacagcatttgagcccctgtcccctgccccactcttggcatgcacacgcagccctggaatcagacaggcctgggtttgaatcctggctttgatacttcctgcctgtgagactgacagtgagtcacttcattcccttcagctccaaattcttcgtctgtcgagatgactagcaatggctgctctcagggctttggagaagatcgtgtaaggcagaacataagaagcgttcagcgtcatgcctggcccacagtgagtgcttcatcgatgcctggcacataaacttactgtaatgtatactgctcttattactcagcacattctcaacgctactctagatttccaaaagaggagagatttttgaaagccgggacctccagcttcctcaccctagaatgatacatttatgactgccaatttcctgggaatcgtattttttttttcttgtctgggttacagtgtgtaaacgttcataaaaggacactgccctgtttgaaagccaagaacagctgttcggagagcatgtgttgtagggaacttctcaaacaatcgcacaccctggccaccaagtttgttttctgaagggtggctttggatccttgacaatatctattactaaaaagaaagtgtttcaggcactgggtccttccccatcagtttctacttctatgactgtggaattataagtcagtggatgaaatccatgagagccatccagtggtgtatcagcaagggtcaaaatgacacagatgacacactcgaatatgaggataattcaagggacattcactgcctgacagattaattaccaaccttcgagtggggcgtagcaggacaggataacctggaaacccaggggtagcaacagtggaccccaaagacagagcatgggataaagctatatccacttttttttttttttttttgagacgaagtctttgtctgtcgccaggctagagtgcagtggcgcgatctcagctcattgaacctcttcccaggttcaagccattcttctgcctcagcctcctgagtaacacaggtgtgcgccaccacacccggctaatgtatttttagtagagatggggtttcaccatgttggccaggatggtctcgatctcttgacctcatgatccaccctcctcggcatcccaaagtgttgggattacaggcgtgagccactgcacctggcccagtatctgctttaagaacagaacagggattttctgtctaaggatgctgccaatctgaggttacctcactctcctcccttcctataatttcctacctgggatcctcagcagccaagcccaaccagaagcccaaggatagaacactacatcaattgtgtgttgccatcatccatacatgttggccttgggaaacagagagcagagatgggtgggaagtgaaccaggaggggcacacagaagcaatgcggcaggggaggtgagggcaatgagctgcgtggattcagaggcactggagaagctagtcccattaagatcaatcagactgatcaactgttgagctagcaattcaaagtaccaactaaagttgggcaaattttctacaatagcaagcgtgtcatgctgcattgcgatctaaaaaacactatatcttttgtgaggcaatatatcgtaaagcccagatagcagaatgattggccgaagtaaaatagatcatattattcacctctactttacagttttactggatcgacttttcctccactccatcccgaggatgctcacagccctgacagtcaatgggaattggctattccctggtctgggtactctttttatcgacgtgttgatttttaggcctagtaactcagttgtgtttgctcccatgcctgcttatgcctgcagtacctgttaatggcaattgaaataattaatacctaattcagtaaactgtaaggataaaaataaagagagttgttacttctgtgaaaattcagttacattctgtggggaaataaaatcagcaaaggccaaccattataaaagaattgcagtcaaagtatgtgtgagccaggcaattgttaaatgatgggggaatcataagaatctagaaggattctatttataatttatggttggtagtcccaggtcattcccttgctcccaattcaagcccgtagccaggcttttaacattcttcccttgggggatttttcaagggtgacagatgcttctgctctgtggtcaattgctaaaatggagaagaggaatccaagccttgctcatcttctggaattttccacatctctttcctttcatccaaagactttgcttgtgcttctttccctcttgtgctccagggacaccttggaaacttccttcattgatcttttaatattaccaagaatgggacatgcccttttcatctgaccatttctgctttatacctgaggtatactgaagattccctgaggtaactgagaaggctttgagtatgaatgtccctcctctctgctcatgtggaatttttctcacttgccatgttacctttggacaatttcgttctatgcctgcctcttctctagacagtaagcccctgaggatggggaacatctctcatgcatcttggtcccttcaatgtcctggaattgctctggaatattctaagcagtcagtgaatgcttgtaaaatcatctgaaaagtttttgaaaattattgctggagacaccaaaggacccaaagattttgcatttataagtaataacacgttatccaagctctttagacccgaaggatgtctggatggggctatggcgaacacacctgatagcaataacttaagcatacctttagaatgaccctgtatggcagatgaacctcgatgtgtgttccgagataggggatatggaagtggccagcctagagagtcattccctgtctatgaagaacacctgagccccggggccatccactggaacatggaccacaaaggggattgaggccctgagtgttgggttgaatgactgccaggtggaggttgttagggggagggtgctacatgaaagtgctatataaactccttgtcttttgcaagctattgcggttcttctgctcagctcaccgccactgggccacgtggttctcatgtccagtccgctgccactgaactctctccccagtacgtaagtccccagtaaaaccccatgtcttgattgctggctctgggtctcttcttcagcctcttgaacctggagccaacctattggagtcaataggggtttggtgtaacagaggactaagcttgttgaagatcagatttgaaaaagcaaataatcaaaagtagaaaagagcaggacactgctaggtcatgcatgatggcctcaataagtttgttccattttttccttctaatgacttatttcttttctttgcctgaaagatttatgtatctgtagggaatacttttgggtgcaagtagcagaatgcccaacaaacagtagtttaaactgtaagttcacttatttatttcttaagaagtccacagctcagcagcccaaaggtgatacagtggcttaataatgtcatcaaggaaagaacatcttcctgtctttccactgaattatcttcagagcactggctttttgtcctgggctcataatcttgcagttgtcactaatttaaatgtcacatcccaacatggcagcatccagaacaggaagggaaagggtcctcttccttgtatggctctctctgatgtagggaggaaaacgtctctaagaaactctaagagttgtcctttcctcattggccacacctgagccaattgggtgacttgcccacgtgcagacaaatcactggcacattttaacctgttgccacaaactacaaattggcttgaagcaagtgtggcttatccccttagggatggatccatcattgtctggaagaataaacagggtctatttgtaaagaaatggggaaccaacagtgtcttctgcaatgtatttgttaccatggcaaacacatgtattgagatacatgcctttaatgtgggagtttttaagccatgagagatatctcaggaagttcatcaagctatctgtgttcaccatttgtccttccctgaggagtagctttttttgtctcaagatcaaagatagaggtttccaaacatttaaaagacaacgttcaggtttttcttgggagatagaggtgcacagaatgtcagggagggaaacgggctggtgactgagaaaggggaagtgattccaacctggtagacaaatggcaatgcctagtaccaagaaaaggacaacacttcttttgggggattgctgttttctgtgggtaccagataccagcaccacctttgccttcagtcttcctggtggggggcagctgtgggatggtagtggcatcaggcttctgagtgcagaggttctgggagcagcaatgtgagtctctgactctcagcctacggtcaggggaaaggtcatctgtgaagagcatctctgagctgacttgaagcatcagagttcagcagatggtgcaagcgccagtcaggagcaggcaaaaggggcagaaacagccactgtaaccttatagtgactccccggggactctgaaacttcagttttcttatttgtaaaaatagggactgtggttgggcatggtggctcacacctgtaatcctagcactttgggaggctaaggggggtggatcccttgagtccagaagctcaagaccaacgtgggcaacatggcgaaactgtctctaccaaaaaatacaaaaattagctgggcgtggtggtatgcacctgttgtctcagctactcaggaggctgacgtgggaggatcctttgagcccaggaggcaggggttgtggtgagctgctgtactgcaggctgggcacagagtgagaccctgtctcaagaaaacaaaaacagaaaccaaccaacaaaaatcggggtcaaaactgtatctatctcagagatacgattaacaatataatatggtgaaagtgcttagcacagtgcctagcaataataaacctactaaataatagctgttataatattattattttctgatattgtatgattatagaaaaagcagagactccacaaccaagatgaaaatggaaattctcagaaattgagttggttaagtcttggagctaaattcatttgataaagaaaaaagaagagatgtgatgccatttgaatctcaatattggggagcaaattcctatctactatattaaggaactaattgaaggtccaagtccctttgagaatcatgttctctttggagtgcagccttttcaattctactgctaatggtaacatagctgaggcagtcacactgttatccagatgtttctgtcacctgtatgctgaattagacatattatggtacagactgtctgtctaccatctaattctgtcatctttgtctgtatgtatctaactattgctatctatctgtgtctatctatctacctatctctgtctatctctctgtctgtctgactgtctatttatctgacctatttagttcttcatctgtgacatgcaccataacattgtctcatttaatcctcacaacaactcttcaggctagaacagaggctttcaaacttcttggaaaagttacaactaagacaatcacttttcctgagaactctgtttatagaaacacacacacatctgaaaaagttgcctatacttactccatgtgacacattctattcaattctatgctactgtattctattctggtccatttaaaacataatttattgtgggtcacaatgtggcttttatgaatcattattcaactgagttcttgttattctccatttatagaagagaaagagttgggggaggttacagacagatgggaagaagcccagctcatcagagtaagagttggaattgaaccaatggcttctctgatgtccgagcactgaccatgatgccctgctgcctctcacggtgctcctctgaggatgggtgcttcacacccagctagttccctgattattttacgacggccattcaagcccacccacctgcctctagctcagtggttctgaattctggctgcatgttggagtccttggagccactgtcctgaggatgaaaattgcatagacctggactggggcctgcgcaggagtactttgtattattttattccaacctatttctatctttagatctaaagtgagtctcggccaggcgcagtggctcacgcctgtaatcccagcactttgggaggctgaggtggacagatcacttgaggtcaggagttcaagaccagtctaaccaacatggtgaaacccaatatctactgaaaaaaaaaatacaaaagttagccaggcgtagtgacaggcacctgtaatcctagctactcgggaggctgaggcaggagaattgcttaaacccgggaggtggaggatgcagtgagccgagatcatgccattgcactccagtctgggcgacagagcgagactccatctcaataaataaataaataaataaaaataaagtgagtctcaacctgttgaactattctaaaaaatccattctgccaatctgtgcctttaatttatttacacttaaagtaattactgataaggaagaacttacttcaaccatttagctgtttgttttctgtatatcttgtatgctttttgttcctcaattcctacaatactgccatttttgtatttagttgattttttttgtagtgtatcattttgattttttttttttttttggtatatgtttcgttattttcttagtggttatcttggggattgcaattaacttcttgtacttatcaaaccctggtgaacaataccaacttaatttcaatagtataaaaacagtctgcccctagacatctctattcactccccctccatattgttatcgtcacagattatatctttgtacatgtgtgcccattaacaatgacgtataattattgtttcatgaacctaacttttaaatcatatagaaacaaaaaaggagttacaaaagaacagtaggtactttgcattttttaaagtctacccatctcatttcagtgtgcacccagggttaagaatccccgcagggaagagcctaatcaggcgcttacttcttcctgttttagtgggggctgagattgcaaagcaaactagctaatttgctgggacatttataaccagggaagattaaataatatgtacaagcagaaacacaaggcatattattaaagcaagcatgtgtgcaaaacacagtgtcctttcaattgcagcattgtttgcctcttccgcagctggctcccaagtatgtaataccgctgcagaactggctgtggggaggaaaaaatgaagtgcacttctctgattttgtctggtgccatccactttcactcaaccttccctcaaggagagaagaacaatactcccattgagtcgcctttgtagcttgaatctgaatctgctttaataattcctgtttttctgtttgtgtataattatttcaactccctgggtcactaagtcctccctgaaatcggagggctgccttattttcatatctatggtatagaaagcccaaagaatacagtcaaattgaatttcctccccctgcataaatggaagagttcatgaattctgttttctccacatgaacaatctattcttgggaaaagagaattgccctttacgaatgatgaaggaggccatcgtcaattgggtggagtccattttcttcttaggaagcagcatgaagaattcatggcttgtttgtttcctgatatgggaaaaattcacgtgcataacagcataaatcccacccacatatttaggtaataaattaggatgaaaatctcctacgataattagatttgaaaatgccacgttcctgtagagctatgcaaataccttagggagtggactatgatgatgttccaataagcctcagtgtgtctagctgtgaaatgggcaacaaagtcccatcttctgaagaaaggctgacattgtcaaagaaaatcatgaagtgccacatttatgactagctttgagattcatggtctttcatttgaaaaagatacaacgtaatgcttcataggagttatcctaatagctcgctgcaatagcaggcgctgatgggattcttgcctgctgtaccgcgtcttggcaaatactgatgtgggattattttgttcgatcccaataataagcgtatcagataggaagtgatattaaccccacttttcagacagcaaagcaggggttcaatgaggttaacccatttatgcctgaggttgcaattttttaactttgaaaaatcagactttgagaagcaggatataactaactcccacatgcttagcgttccaataatggaacactaggcataaatttaataagctcagttataccatctgaaaagtggggttaatataacttcctcacttcatataacctgcagacatcattgccaggataggaagacaggtcgcagggcaactgaagacctggtcacttttccccagagttagggagatgtaacttgtggagagctggatgcttttaggcattacacaaatgaattccatgtatttatttatttatttatttttgattaaaaatttttttttaaaattctactttaagttctagggtacatgtgcacaacgtgcaggtttgttacatatgtatacacgtgccatgttgttgtgctgcacccattaactcatcatttacattgggtatatctcctaattctttccctcccctctccccccaccccacgacaggccccggtgtgtgatgaattccatgtatttaaatgaataaatcaagcaacaaatgtatcaagtaatgtcacacacttcattggacaaatattattactttagggcaagaactaataaaaacaaaatgaataggttacagaaaaaatattgagtaaataataatccaggtagtacatgtcagaaatcttaatagcttattcaaatgactagaacatattttttaaatggtggaatagaaaatgtgaaggccgggcatggtggctcacccctgtaatcccagcactttgggaggccgaggcaggtggatcacctgatgtcagaagttcaagaccagcctggccaacatggtgaaaccccgtctctactaaaaatacagaaaattagccactcatggtgatgggcagctgtaatcccagctactcaggaggctgaggcaggagaattgcttgaacccaggaagtggaggttgcagtgagccgagattgtgccactgcactccaacccgggcaacaagagtgaaaccctgtcttaaaaacaaaaaaaagaaagaaagaaaatgtgaaggaccctttatatttttttaatgagtggactcattatttccagagtcatagcccccaaatattatcagaacctctaattgtccaggggcaggggcacattcccagttctccttttgccacagggcacagcccaatgctggagccctgcaaacccttaggaaactttgctgaaagtgtgctgtgtccaaaggagcctaggcgactttgctgatctgtcaccaacttgctgtgtggctttgggcaagtcacttcacctctctgtgccccagattttttctgtataaaataaatgtgtgaacaagtttgtatctaaagtatattccaatgctatgtttctggttggaatgagctaattaattaaaaaattactaagtggatattacctctagctattttggggggaagtaccctagcctggggatttagagtgggactctgggtgcagaataactggtttgaatcttgtctccaccacttttttctttctttttcttttctttctttcttttttttttttttggagatggagtcccgctgtgtcgcctagactggagtgcagtggcgcgatcttggctcactgcaacctccgactcctgggatcaagcaattctcttgcctcagcctcccgagtagctaggattacagcacccaccaccatgcccaggtaattttttttgtatttttagtagacatggggtttcaccatgttggccaggctggcctcgaactcctgacctcgtgatctgcccgcttcgtcctcccaaagtgctgggattacaggcatgagccaccacgcctggtcaccaccacttctctctgtgtggctttaagcaagttacttaaattccctgcacttcagttttccgtagagttcatgtacatcagttgtcaaagggcagatgtctggcacattggaaatattaccgaatgttagttatccgtgaatcgggggactgattttataaccacccaaatcatatttatttcctagaggaatgaagatgaaaatagtggtggttagtgtctagcatcgcactatgtttgccaagattaatttgcaatgagccgttttcaaacaggatgttcagccactatatgtacttcttgaagtaaccagcaggtggtgaagttggattatattttagatggtcagggcctggtgtacctcttgcctggggttttgtgagagaaaaaaaatagctttcttttttatcagcaccccaaaccattaacatctggaatcaatagaggctgtatctgtcacttaatgctatagaaattgcaagaaaaaagtcctgctggttagtataccagttctcaaaatgtcagcatcatttgtgtcacctgggggtacttgtcaggaatgcagtctctctggtcccaccccacaggatggaactggaaactaaggatgagcccagtcatctgtgtcttcaagaactctccagtgattctggtgcacttgtgttatagaaccgctgtgctagaggtcttagtatttgctgtgaatgtgagtaggtaaagagagggtatttggtgagtgtcactacctcagtgcaggccagggaccagtggttccacatcaatgtgggggagtgttagaatgcatggtctctggccacaccccaaacaagctggattgaaagtcgcattttcatcagctcctggagattctcctggagattctcctgtatgatctctttctctttttctttccttctcttcctttctcattctcctctctcttcccctttgccatctccactgctccctttctcagtgacaattgggcatacccctcgcagtgccggctgctcaggtgggaaagtggagaagactcttctatttcccagcctgagaaaatttgcttacctgtaatcccagcactttgggaggctgaggcgggcagataatttcagcccaggagtttgagatcaggctgggcaacatggcgtaacttcgtctctacaaaaagtacagaaattgacccagcatagagtcgtgcacctgtagtcccagctattgaggaggatgagctgggaggatcatttgagcctggaaggcagaggttgcagtgagtggagatcgtgccactgcactccagcctgggacagagtgagaccctgtctcaaaaaaaaaaaaaaaaaaaaaagaaagaaagaaaacttacttgaagcctactggagacagacagctaaacatacagtgtgggacacctgtgctgccacctgagtgccaagagcagggaaggaccctttgggttgggagcttcgcacagagggtggccttgagcagcacctagaaatccagttgagatcttcactttctccacatcctcctctccccctgtcgtctgttgttctttttctacttacctgccttctggctcttttcacctgtggataatttattcccacaactcagtctcaccaggatgacttaaagtctaaagtacacgtcagtggttctcaaagtgcagtccctttccagcaacatcatcactttggaacttgttagaaagacagattctcaggctcactccagaccttgttaaaggaaactttaacaaggcttccagaagattctaacacacatgacagctagagaactgtggctttagatggtggcagaaattgttcattgcctactcaagccacgggttcaaattcttcttggtaacagacccagataggggtccaagtttcaggtgagtaacaaacactgttctcagaaacagtaagctctttcccttgccccaggggaatgaaatacgattcgtctacactgcgattctacttcgcaatgacatgtagtggcaaattggggacccaagaagcaactgatggcacagtcttaataaggtaatttaacgggcatttcctgaaaataggctatttataggaatgtgaatgtgtagtaacgcaaggaagagtgaagtaaccacagaaaacagcctgagttgccttccctgtgagaaggatcccttcaactctagacctaagggagcaagaaaggagaatttaggagagagtcaagttggggagtccttgacaggagcaatgaccttatctcaaagtcctcatccagcctgaggtcaagccaggggggatgtcaggggactccttcccctctccccatcattgtcttctctccctgagaccttgaactggcaccccccattggctgagaccatccgggtatacaggaaccctaaaatctttacaggtaggctttaccagtctacatagggtattaaagagcagaatatgagtttggggagcaaaaggaagacatcctgttcattggtctaggggtgagcaggtggcccaatctggccaatgagacatatgggaaagtctgctggacgcttctggaaacattttctttcctgactgtcgtagaaagaaggctctcctttctacttgcttgggatgcttttgagaggttgcacttcttggactttgaagccacctttggccacaaggggaatgcaaagagaactactgtcaagaacctggatacccacagagctattaaaaggccttggaacccccagctccagccttcttgttaagcaaacaatggatgtctctatagtttaagcttctgagggttgtgtgttctgtaatgggaaaatctgtggagttattgctaggaatggtaatggtgaaatcattaaaacacagaccccaattcagagtcaaattcagctgtgttgatgcccttggatctgattaaaagagcttccttcttatttgagtaggggaagtggattctggaagacaatagaatatggacatggaaaggcatccctgagtgcctgaggagggggcttctgggggaagagcctggcagtgatgcctggagagtcagggtcacacccctggcccaggcagagggcactgctcaaaacaccttgtacctccccaggcaaggtccttgtaacccatgacctcagagcattgagtactttagctcagcttcatctgtgatagagaggagacagctcagcctgtctcctgtgaggggaagatttctgtgtgtctgaaggaaaagttctctgcactcgcccaatgcacagcacttcacagctgccctcaccccagcatcgcaatcctctcaactcctgccctgtatcagcctctcccctccccaaacagacaggcagccaggagtaaggccatggtggttgactcaagcatctctcttcccaggctgaagttccacaggtcttgctctaccagctacagtcctgtgacacttagcaatggggtatgttctgagaaatgtgttgttaggtgatgtcatcattgtgggagcatcatagagtgtacacacacaccttcatggcatagcctactacacatctaggctagatggcttggtctgttgcttctaagatacaaaatctgtacagcatgttactgtaccgaacacctcaggcaaccgtaacacaatggtaagtgtttgtgtatctaaacatagaaaaggtacaatacaaatatggtgtaaaagattaaaaaaaaaagatacacctgtgtagggcactgtattagtccgttttcacactgctgataaagccatacccaagactgggtaatttacagaagaaagaggcttaatggacttacagttccacatggctggggaggcctcacaatcatggcaaaaggcaaggaggagcaagtcacatcttacatggatggtggcaggcaaagagagagagcttatgcagggaaactcctgtttttaaaaaccatcagatctcgtgggtcttatcactatcacgagaacagcatgggaaagacccgctcccatgattgaattacctcccaccagtttcttcccaccacatgtgggaattgtgggagttacaattcaagatgagatttggatggggacacagccaaaccatatcaagcccttatcacaaatagagactgcaggactggaagttgctgtgggtgagtcagtgaatgaagagtgagtgaatgtgaaggcctaggacaggactgtgcacaggactgtggaatttacaaacactgtgcacttaggctacactaaatttataacaacatattttcttccttcaataataaattaactgcttactgtaacatttttactttataatttttttagttttttaaactttttgactttttgtgataacacttaaaacacaaacacattgtatagctgtatgaaatatattttctttacatatttattctacaagcttttttctattaaatttttctttttatactttttaagacattttgttaaaaaacgaagacacacacattagcctaggcctacacagggtcaggaccatcaatatcgcactgtcttctactttcacatctgttcccactggaagtcttcaggggcaatactatgcgtggagctgtcatctcccatgataacaatgccgtcctctggatacctcctgaaggatctgcctgaggctgttttccagtttttttttttttttaaatttatagctagaaggagtgcactctaaaataatgataaaaattatagtatggtaaacacaaggcaataagaatattttgattccattataatcttatgggactgcagtcatagatgtggtctgtccttggaaatggtatgtggcacatgactgtgcttcgtctgcctctatcctctcaatcccaagcgcctatttctctaatagtcagaggcactgacagaaagtcaacacacgcattctgactgagctgcacagtactgaccctgttagtggctctgaaagtcaaaaacgctttagccttccatcactaatctcattcctcttttgtttgtttgtttgtttctttatttatttatttcctgagatggagtcttgctctgtcccccaggctggagtgcagtggtgcaatctcggctcactgcaacctctgcctcctggattcaagcgattttcatatctcagcctcccagatagctgggactacaggcatgcatcaccatgcccagctaatttttatatttttagtagaaatggggtttcaccatgttgaccaggctggtctcgaactcctgacctaaagtgatcttctcacctcgttttcccaaagtgcttggattacaggcatgagccactgaacctggcatcattcctcttttaaagcttattcaaaccaattactttcattgaacttgccaagaattaaatggagaggaagaggtttcatgttaatcaggactcctctttcccagcttcttgagtcattttgcttgagaacaaatatgatcaaagtgcagagtgaaggaaaggcatacgtagaggaaagggggcttttgtatgccaagccctgttcccacacctcatatcatttaatccccaaaccataccaatcaccccattgtacaggggagatactgaggcttacaggacgtagcctaatcccctgcaggaaagaaggtgtggatctggaactgaacggggtggtctgggaagaccacctcgatgaggtgacatttgtctggaggtcacgatgaactgagaaaacaaatgatatgaatatttagaggaagaatcttccaggagaaggcagtgaagagtgcaaagatctgagagtgagcaggcttggtaagttccagaaagagcaagatgactagtggagtggggtgagaaaaaaaaaatgcagtgggtgaggtcagcagggtggaaggggtggggcagataaggtaaggtcttgctcgattgtcccctgcagtcacacatatgggactcaccccattccctctgcttgctggtccctgtccaccccacatggtagcatttcccatgctgagtcaaagtggtctcttcacatctgtatttcccccttgactgaattccctgcatccagctttgtattctggctcccaatggagtcttacctacaggcaggtccctttgcttgagccggggggcaaatgaagtttcttgcacaaaatcagattatgctggaatgcagacacatctacaaaactgtgcttcgtaaaactgcatcatctttttcaagaatggtcagtaccttcctggctgctctctgcttgtgaaaaactgagtattttctattcctctttgaaattcacatggaacataccagcatataaaaggccctgggaattgtggaatcaacagactttattttgttgaacctacctttgatttaaaaaaaagtttgttgagcattagaattttcaaaagacatatggctttctagcagaactagttttccagggaaagcaatttggaaaacactcagttgagtggagcagcagcaatgggaatcaagaaatagatttcgtgagacgtgttcattctttacaaggcctaggccttttaatattgccagtgaagggtaggaatggatgaactttttcagaatgaattgattaattcattaatcattaatgaattaattcatttaattaattcattaatgaattgattaaatgtgtattcttaaaaatatagggaatttggttagggaaccacagctcttgcgttagatgtaaattgctgtgtaacaaattacaacaaacatggcagctttaaaacaatacacatttataatcccacagtttttgtgggtcaggactctgggtatgggttaactgggttttctgctcaagatctccaggctgaaatccaggtgtgggctggactgcactctgatccgagtttcagtgtcccttccagttcactggttgttggcgcaattcatttccttgcagcggtagaactgagaatcccttttctgctcaccgtcctccagggacagctttccacccctagggggcgcccacagttccttgccatgtggctttcctagaccattcacaatgtgacgtttactttctcttttttaatcttttttattattatttttaattgacgcaataatcgtatatatttataggttagagcttgatattttgatgaatgtatacaatatagaagatcaaatcaggataattagcatatccatcatctcaaatagttatcatttctctgtgctgggaacattcagagtccactcttccagtgatttgaaaatatacagtaaattgttaatgatagtcaccctatagtgctgcagaacactagaccttgttcctcctatctagctgtttacccaccttggttttccctcctgcccctactctacccaccattccctgcctctggtaaccattattgtcctctgcttttatgaggtcattttttttagcttccatatatgaatgaaagcatagagcattcatgctcatgaaagatgagatttatctttctgtgctagactcccaaagaaacaggatcagcacctgacaaccgctgagctttcttttgacctttggatagtagttgacagtttgttttccttctgcaggttcattgctaggatttccccataatgcatgtgttccagtggggaatgtggcacatcccaggcaaggtcactgaggatttttgagcaatcattttctccaggtcactgtggtcaccggggcatagaaggtgaaatgctccagtctgtaactggtctagattggtagtgatggaaaaacattcttattgtcagtgcccagccactgggcggtggggggggaatgccagctggcaggggcactgagaacaaaaccaaatggatagtacgatgaagcaaggatcaccaggtgcataaaaggagaaacaactaccatttatcgaaggccagtaatgtgccaagcattgtgccgagtgctctttttgcagatgagaaaactgagtcttggaggttttatagctcatccaacgtcacacagctaggacacggtaccagggtacaaatatagactaacacaaaactcaagttggaacacaatggttgcacattaaatcattatgtaatgcaaagagctggcctagaagatggtaataaaatggcttacatagtccctgtcgtgctggaaaagtggtatttataagcaagagctaagcttgcctttaaatttgtcaagctttggaattgagttactgtttctggacatgtgtcacacctatacattgagatgatattctctttgcctggcaaaataacgaataagcaattgtaaagtcttttgatttttgtagggaactatcataagccttcctgatcctccctaatcagcaggctaagtcagtttgctgccatacatagaaggagcaggttttggaagagacagttgccagctctgccggtttttatgttagtgttcagttagctcacctataaaatatggataatatccgccagattgtaagactcgaatgaatgatttaagttcagtgcttagtaggtattcatggctataatatcctcactggtgtagcagagaagaggaaaaagcaatttattctaaccgtggatgctgagctgtgtatgaaatgtgacttgatttttttgggcagtggagcagtgggggtgggtagctgctatcttccagaaagggaaatgtgtgggatgatgaagaaagtactaaactctgtacccaagaactctgttcaccatcttcccactggcctctgggcctcagtcttctaatgtgttaaaatgaggcttttttagataaggtgaagtctgcagggtatttgttccaaaggatgggtgtagggggttaataattaaagcatgctgtgatccaattagggaaacaattgcaaagcaaattaaacagattattgttattatccttagacttctcagaacctttaatgtgccaatgtgtgtgctagctctcctagaaggggcgtggtagagagtttcccaaactaatttgaaagatgcattagaaacattttatttccatcatccccaaagctcctcttgacctgaaattctatgattctaatatctacgtcatgtagaatggctggttctttagaggacagtaacaacatttttctagttttgacttaggattttggataaggcaaattctacttcctgttacctctggagacatacgcagtcattcagttatctctcttgcctttgaactgggtatacatattcagttggattatttatctctggatttgaaaggattgcatttaattttgaatcaaggggaaagtgatcgtggtgttctgagtcactagtgaagccagttacaagccagcctcaaagcaagcacagtcttgcactgattaggaaacgttgagagaagatggcagccagaaatatttgaagctttaacaccaaacagttgtgacagcaaaggtctccaatttttgcttttcatcttaatattatctttatttataatatttttaaatgatggaactactaaactgaaaaatagtgaaagctactaattattaaagtgcttaccatgtgctgttgctattctaactgctcttcttgcattatagcctcagtttcatccctgagagacaggtcctattttctccattagccaggcaaggaaacgggcagacaaagcagattttctgaagttacacagcttagaggagagtggtccaaatcccgtcttcatcagttcctggccatgtggctctggccaactggcttatttgctttaaggtttgttagctcttctactaaactggaataataatgaataataataacaatgataatagtttctaaatgacgaggtcgttgtgaggattaaacaagctattatatttatggaatgcagtgttgcctgcacagtcaatactcaaaatctgctagctattattttaaaattatggttattattactatattgacatgtatgttaggaagctgttattctatctcagagataatgcttttaatataaaatataaatataattgtgtgtatatgggataggtataaatcttaagctattaattcactgttatgcctttttaaagtgtgtagattatgtagtcataagttaatacctatagctttcattctttttccaatgaaataaagctgttcattaagagcgtcatgtgaaccaaaaatttggaataaaatcatattgaattgtaccagagtaggaactctcatagagtactggtgggcatttgaagttgcaaaaaccatggagagggaataatttggcaagatctagtaaggaggaggctgtgcatgcctgtgacctagtaattaatatcctggagggactcacacatgtatacaaggagacttgggcaggaatgttggtggcagaaggatttgagatagtaaaaaatggaaaccaactgaaggttcagcaactagataaaacaaatgaattagagctctaagtactggcaaggtaatatcataaaagtaaaatattgaattaaaaggaaattacaggaaaatatatgcagaataaaatctgcaaacagtatcataaaactgatcatgaacatattcatatattgcaaaaatatcatacaagcttgaaatagtgaataccaaattcttgaattcagaatggctgttgtttctggataaggaggaacaaagatgggtttgctgaaaagaaggcagtgcaattcaactgcatctgggatgtgatttttatgaacgtgttggggcatgaatgaccaatgccaagatttgacaaagctggatggtggctgcttttttgtatgcttgaaatgtttcataattgtaaaaaaatcccattttattacttgttttgccttctctcctctttttgtcttcatctgtttcatagtttcaacagacttagcaccttatgtctaggtgtacgttttgaggggacagcaattttttgtgctacaaactttctgtaagaggtcttggacttagggattccagttctcagtgttagaccttgttttctgctgggttcagatgagaggtcatacagtgcaagctggggcccaagttgagttaattatttaataaggcttccacttagtctgtgtaaactccacgagctctcctgatggccaactcattcacactccttggcccacagagggttcagaagggccaggaggtgagacagttggtgagaacaaacggcatccttccctgctgtttatcagtgtttctgctgcttgctcaagtaatcaacagcataggtagggcttaaagaggaaatccggtgcctgcagaattatgactgacctattgaggaaaggttcagagaggctggggagtttgtgaccttccggttaaagtgtgacttcaaccaaggcagaccaggagggtgggtgaggcatccagttcatagatgagatcagtgtcaacgggtacaaatccagcagggtgactccatgcgtgtgtgtgtatatgtgaataacacaaagcatgtcatgaaatagatgcattaaatctgaagtatgtaatgttgtatataatgtcttaaaagttcccaattcagcacaccatgaaatgtctaaccatgacaattaaacaatgaaatggctcgacaggaagggcttttgcattccttacagaacttacattccaaaaaagccaggtggagacataaaacaatccttcctcatagatggtttgtgttgtgttggtttattttattttattctattttattttgataagaacatgtaatatgagatctaccctcttaacagacttgtaagtgtacagtagaatgttgttatctatggcacaatgttgtacatgggtctctaggacttacttatcttgcataactgaaattttatatttgttgattagcaactcccatttcctcctccttccaaaccctgttaacctacattttattcttcatttttatgagtttgactgtttagctagctcttataagtggaaacatgcagtgtttgtccttctgtgactggcttgtttcacttgatgtaatgttttcaaggtttattcatgttatcacatatttcaggatttccttctttttaaaggctgaattatattccgttgtatgtgtgtgcatgtctatggaatataattatacatgtacacacatacaatggaatatatatatatatatatatgtatatatatcacatttactttatccatttaccctttgatggatatttaggttgtttccacatcttggcaattgtgaataacattgctatgaacacagtagtgcacatacctcttcaagatcctgaattgaattcttttggataaatactcataagtgggattgctggatcttattatgaagcaaaattagacaagtgggactacatcaaactaaaaatcttctgcacatcaaaggaaacaataatagagtgaaaggcaacctacagaatgggagaaaatatttgcaaattacatatccaataagagttaatttccaaatatataacttctacaacttaataccaaaaaagaattacctgattaagagacgagctaatactttaataaatatttctccaaagaagacatacaaatagccaacaggtatgtggaaagatattcatcactaatcatcagggaaattcaaataaaagccatgaggtatccacctcacacctgttaggatagcctttataaaagaaaaaaaaaaccacttgtgtgctgttggtgggaatgcaaaatggtgtgcagcttctatgaaaaatagtatggaagtttctggaaaaagtaaaactggaattaccatatggtccagtcatccacttctgggtttatttgttttaaacacatgcatgtgttcacacacacacacacacacacacacacacacacacacacacagcctttttcctttttagcttatttattttgtttcatatgaggaattgagaaagcaccatggggtactggagccatggtggtgatagctttctagaattatctgagactaactgtgtggtcagaggcatttctcatctttgttcttgggccagttggtctgacgaggtgagaagctggatggggagccccctcttcagggaattctatttcccacttcaagagtgaaccgtagtcatcagcccatgggctttggtgtctgagagatgtgagttcaatttgggctctttccagttctacaacttgatgcaagttactcctctgagcaataatattcccagcttaattaataaattaattaataaatgctcaataaaaattatcattactgttattattttattaatttcatttgtaaagcaagtcttctatgtaaccttccagtgaaatcaggaaagaccctactgtcataatttaaaacaagttttgtaaaacttaattttcattcctttatcattggtaacattcacatggttcaaaagttactaaggctatcttccccagggccttccatggaggccttcactgtgttatgcctttttaaagtgtgtagattaggaatatgcaaacaaacaagcacatacatgtaccaggtagttacttactaagtagactatgtgagcactttgctttttttggtcacttaatgtttctgggagatatttcctttttgttacataagaggtgaagtcattcttttgtatgactgtgttgtttgacaaatggattcttttgattttttgacttttctttcagtcttcttttgcagtggaatacctaggagttgtgttgtatttcttcattttactcatttatttttcttgtctgtgcctcttgcactagctgagccttgattccatcatgatcgagggattccaccaaattcactatttgagaagccctgtggtgtgatgcatatcagggtatatgccccaggaaggtgagtttcataatcaacgttgctgattacaatcaatgtttcataattaatctactcaggaaataatttctgagcatctattatatgccaaacactgttctctaggctccagggacacagaagaaaagatgatatggcccctgaccccgtggagtttatggtggagcaagggagctataaagtcatgtagtaactacaaaaaaagcctggcagatgtcgtggtgggtaaatagaggaggccttaagcatatagggcagtggttatcaaacctcagtgtgtcttagtattccttggaaagcttgttaaaattcagatgactgggctgcactccccagagatttagataaagtgtgtttatgctggggcccagaagctacatttttactaagcaccacaagggattctggtgcaggctgttctgtagacctcattctgagaagtactggactaaaggttagtaaagaaaggtgggccgggtgcggtggctcacgcttgtaatcccagcactttgggatgctgaggtgggcagatcacctgaggtcaggagttcaagatcagcctggccaacatggtcaaaccccgtctctacagggtctacagaggacagcccctcctctctgaggctgtgctttgctgtgcttgtgaaggtttgtgcctcctctggccccgagtctcattcacacccacctgtctattcctgttggtaggtgagccctggctctagcttgggactcaggccccatgcatctcattttaaaacaaatgctctttgtattttgtaaaaatacaaaaattagctcaacatggtggcgggtgcctgtaatcccagctactcaggaggctgaggcaggagaatagcttgaacccaggaggcagaggttgcagtgagctgagattgagccattgtactccagcctgggcaacagagtgagactccgtctcaaataaaataaaatagaataaaggtgtattagtcagttttcacactgctataaagatactacctgagactggataatttgtaaaggaaagaggtttaactgactcacagttccgcatggccaaggaggcctcaggaaacttacagccgtggtgtaaggggaagcaggcacattttacatggtggcaggcaagagagaatgtgaaggaggggctgtccaacacataaaaccatcagattcatgagaactcactcactattatgagaaaagcatgggggaaactatccccatgatccaatctcctcccacaaggtccctccatcaacacatggggattacagggattacagtttgagatgagatttgagtggggacccagagccaaagcatatcagaagccttcctggagaaggtgagggctaagctgagatctaagaaatgaacatgaatttgccatgtaaagaaggtagcaaaagatcttctagtccattacttctcgaagtgtggcccacagactggtgtctgtctgcagactgtttatcgtcagtccccatcaagataggcacagaaattcagtgtttaaactttatgtggcaatttgacattgtaacgacaccccagcatgtgattagtggattcatcagtggactcatctatactgtctgagcttggtgtagacctgcttgggtgatgttaaattcatgagggcatcacatgtgacacaaactgcacccttgtcctgtatcaagatcacatgtatgtacaggatggattggaagttaagtccagcaaaaagtcccagtgctggttctgccccaaagacgggtttggggaatattgttctagacagaggtacaagaggacagctgctttggaggaactggaagaggtttagtgtgatatgggggcctagggtatgagaatgcaagtagtaggctgtaacctggaacagaaagtaaggcgggcaggttgccacctgattgagaaatttagaccttgtgcaagtggctatggaaatccactgagggaacttaattgatgtttttaggcacgaggcccttgtgtttagaaattcattataaccctcctgtgtagttgggtttccctgttacctgcagtctattttcaaagccaggtaagagttgaggaagtagcaagattatgaattcccctaagggtttactgtttatccagtggtttgcttgattcctccatgggcttctcccatgacggcccctcctctctgaggtggtgcttgtgagggtttgtacctcctctggctacaaaccctcattcacacccacctgtctattcctgttggtagataagccctggctctagcttgggactcaggcctcatgcatctccttttaaaacaaatgctcttagtgttttccacataccataatgctttgaaaaaaaaattcaatattttatttaaaaaatttcaaactataggaaagttagtagaataacaatataaatacgtttttacttttcatctagatccttcaaattgttatcatttggcacattggtttctctccttataacagatactgtatattatgtaatatatgtaatatataatgatataatatatgcacacttttttctgctaaatcatttgggaataaatggcagatattatgcccatttactcctaaaaacttcagcatgtatcttctaagggcaagggtattctcttacataagcacatgcactgatcacgttaaaaacatttaacattgctacaatgctatcatcagtagagtccatattctgatttgctcaattgctcccaaaatgctatcttaagcagttaattatctgacctaggatccagggtcacatatggtattagttctcttcagtcttctttattctagaatagtgtcttagccctcctttgttttttctgatactgacaattttgaacagtacaggccagtcattctgtaggatgacccccagtttgtgtttgttttctggttctttcctcctgattagattcaggttaaatagtttgacagaaaaactgtaggaatagtattgtgttcttggtgaatcatattccagggtgtacagtgccagtttgtccctttattggcaatatgcattttggctgcttggttaggtggggctttgcaactttcaagatgcaagtccctggaataagtttattgccatgattgtttccttgggtacaagggttgccttagagtatgtctttctctgggaaggcccttctttactcctttctaagagggcgggtctctgccagctctgccttaggacacatgatcaatcggtcaggtgacttctcccatctccaagagcctgtgttctagtgaggagagacaggcagtaaacatgtaaatgtaaatgatcagaataaatgagtcaattccagattatgataagtgctgtgaaggaaataaaacaaaggaatgggacagggttaggtaggggaaagttgccatccataaaaccaagttcctgccctcctggggtacccattgcaatgggggacatcaaggataacaaacatatatatagcaagtcaggtagtgctgagtgctgagtgccctgaggaggaatgaagtctgtaaggagagaggaatatcctgaaggattctacagagggggcagagaaaacgtcgttcaggaagtgacagttgagtggagaaagaaataaagcaaggacaagccctgtgagactcttgggggagagtggggcaggcagaggcacctggtgggcacagagttggaggcagcagctcttagtgcagtgaaggaaaagaaagaggctgggctggtttgggaagtgggctagagtgaggaatgggctggagtagggagtgggctagagtgaggagtgggctggaatagggagtgggctggagtgaggagtgggcaggagtgggtagtgggctggagtgaggagtgggcaggagtggggagtgggctggagtgaggagtgggcaggagtggggagtgggctggagtggggagtggggagtgggctggagttgggagtggggagtgggctggagtggggagtggagagtgagttggagtggggaaccaaggtggggccagggccagaccctggaggcttttcagacctttttcaatggtaacgacattggcttttatattcatatagagtttgggaaaccgttggggtgttgagagcagggagaggcatcatccacgttttaaaagtatcagctaggccactttgtagagaaattgatgaggtgggaaggattgggtccaaggtcaaagtcaggcatctaattccatttcaaatcctaagtttcgggatgtatgggaaaaagagacacgggagagggagagaagtggcctcttgagatccagaacaccagaccagggagaggccagcaggctctgtctcagataaggggcaatttctgtggtcagccaaagccgcatttgaatctcaaagcagaaaacccagtatctggaagaaaaacgaagggggctccatgggaaccgtgaccttgttctgttcacctgtgcctccccaatgcccactaagggatgctcaacaaataaatagatggatggatggctgaatgaatgatgcaacacattagcttctattattattaatgttcaagtatggaaacccatctcctgagggtgaatttgcaccatgtcaatttagctaaagtgggactacgtttcccggagtttgctttcttctctatcccctgctgggagttgcctgcaagagaaatgtgcacgtgacttagaagagggaagtgaggagccggcagtttgaagcatctgggggtcagcatggaaccaacatgttcgcagctgccgcaagctgtggcaggtcagcaggctcatcttcttggcgctgggcagtggctccgttcctggctcctgaagcccctgttgaccaactccttctggtcttcaaatcctggtccaggcagatgtgtaactgcatggtgaggaggctccaccgctcatgcaggtcacatgcgtggttgagatcagagaccacgagaaaagtcacagctgcagtgtatcacgaaggtttcatgctgttctttagccttcctacttcatgcccatcttctcgacagccggttctgctgacttcagctgacttcaggagcggctcccacagtcatacaaaacctaatctcataaaataccccttcaaactcactcatcctggtcctgcttccctgaccaaatcctgaggatgagactggatttaagtatttctcaaccttggagcttcttgggctttgctattgcaaatgttaagtaagaatattaattttaaaggcatgtttatcaaaataactgatcaactcagctattttaataccagcgattctcacctaaacatacggaattgttttcaaatgggtgaatatgtttctcttcaagttttatagatgtttggtaagaaagcaagtttttcttttttaaattgtttgcctaagagggatataaggaaatgtctgtgttcgattttgcaatatgtgtgcgaaatgactttgcagtgagtcgtggaggtgatgaagttcagctggcaatcattggcagaccccgccgcccccccgccacccccactacacacacacacacacacacacacacacacacacacacacacacagttcccctgcttgggagctgtgacctttaactgagttcctgagattaaagtttagtcctagtttgaggctagacctaaaagattttaatttttcagatatatgggggaaagagacctgaaagaaggagagagaggctgggctcagtggctcttgcctgtaatcccagcactttgggaggccaaggtggaaggattgcttgagcccaggggttcgagaccagcccggccaacatggtgaaaccctgtctctactaaaaacacaaaaattagccatgtgtggtggcacatgcctgtaatcccagctactcgggaggctgaggcaggagaatcacttgaactggggagggagaggttgtagggagccaagatgacaccactacactcaacctgggcgacagagcaagactctgtctctaaaataaaataaaataaaaggagagaagtggctgcttgagatcctgaccattggaacagggcggggaggcccctgggttttgtaacagctaaggcacaagctctgtgaccagccaaagctggatttgaatctcaatcatgctgtgtaaccagaagcaattgatgctgcatcttcaagtcttgatgtcctggtttagaatgtgggtgataatcatttctccatgtttgcaaaggtcaaataggactgtataccaaggactcggcacagcatctggtgcccagtgcagcagacaagggatgcctgactttgaccttgctaggtgacctgttaaataatttttctgtgcctcagtttcctcatctgtaaaatggggcctactaatagtatccacttgataacattttcatgaacatgaaatgaataaatggtgtggttaggatggcaaacactagattcaaatcctggctccaacacttaattgctgtgtgacctggagaaaattacttaacatttctgaatctcagtttctgacctacataaaatgagtctggtaataacagttaccatagggctgttgtaggagttaaacgccagcatgtatgcaaagcagttagcagagcctagtgcatagaaagtgcacgttgtgcacatgtaccctagaagttaaagtataataaaaaaaagaaagtgctcagtaaatactgtttattagtattgctgtccttatcatgataattaaccagattcaaagatctgagcgaagggcattgcaggcctaattgtctttaactcatacaaccattcttctgggtaaggatgacaccattcccattttatggagaagccactggaaggttgatagtaggtgtcatgttcatctctctgactggggagctgagctcctaaccacttcaccttactgcctctaggttatttttttgtttccttttctttttttctttttttttttgacagagtctagctctgtctcccaggctggagtgcagtggtgtgatctcggctcactgcaacctctgcctcctgggttcaagccattctcctgcctcagcctcctgagtagctgggattacaggttgcaccatcacaccaggctaatttttatataggttattttttctaagagtacctcctgaggattgaatgaatggagcagcccacttcctctgggatcactgtttctctcactccagggtttgatacacacagggcagcctggggtttgagtgcctgcattgctattgggtgtcatcttttaggacacatttgaaagccaccccctgacacatgggtaactatgtgaggtgattagtgtgtgaattaggttgattgtggtaatcattctcaacatatacatatgttaaaacagcacaccttcaatattcctatttgtcaatcacaccacagtatagctggaaaagaaagcaaagaaggaatagggtgatctctttgtgttgcaagtgatggtggggggaatggtgggtgggtggcgggggggactctgactgatcttcccgatcccctcagtttcgttactctgttgacagtgggaattctgaggggcttctcaagggaaaaacataaaacctgacctttgtgtaattctaaagcaagaccttaatgaaaacttgcttttaataatgaagaatgacagtatcaaaagtcaggaagcttctccatagacgttgcaactaaaatatatatcagtgaagatgcttgttgctaataggcgggaacacaaaacaaaatctaatgtacagaatgaatttcctctttggactcctggcgagtgaaaggtaagtagatgctagaggcattgagctctgtcgattgcttaggccgcatatttcaggactgacatgtattagctcagtgcttctccacaaggacaattctacccccaatcccagcaaaagatgtgtgtcaatgtttggagacctttttggtgtcacactgagaaatactactgtcatctagtagataggggtcggggaggctgataaacattctacaatgcataggacagcctcccacaacaatagcgaaaatctgatccataatattatagtgccaaggttgaaaagccctgagttagaaagatgttaggcagttgtcatcaaatattaacagctaaagaaaagttttttgtgtttggacatgtgtcttagctagggttgccataacaagacactacccattgggtggcttaaacaataggcatttatttttatcatcgctctggaaactggaaatgtgagaccaggtaccagcatggttgggagagggataacttcctggctggcagatgactgtcttcttgctatgtggcagggagagagagagcaagcgagcaaaagggaacatgatgtcttttcttaccaaggcactaatgtcatgagggcctcaccctaacaatttcatctaaccctaattaactcctaacagccacatctttaaataccaccatattgagggttgggacttcaacatataaattgtgggggaggtgctaacacaatcattcattccatacaaatgtaactaataaggttaaacatgtatgtagcatttactcttctaagcgctttacatgtatatgaactgatctaatccttgaacaagtctaaaaggagacaatgactttatcctcattttacagatgaggagattaagtaacttgtccaaggtcactttggttggggatgcagagcctggtttccaacccaggcagtctggctctagggcctgtgttcttaaacttgatgtgaagagtaattgacatactccatccgttgaaacttcctccagttaaaacaaataagaaattatatgtaatgactgcattggcgtaaagaaaaatacaggttggattcattatgacgtattcattatcattattatatttctttttccttctgattttaaaataaattgaaataaaaacatttttgtggtcctgggtcctgacactattcctaatggagaagtcagccttggtggcagtgggtgctgtcaggaacatgatggattgaagaaagtcaggtgtgaaaatgatgggagtttcagcagcctgggaagctgcgcccctgctctggggacagcagttgttcagctccagcccactgctaagaagtggagggaggtcagagaatgagggcttagtattgacaaactggcaaatgttccaattttagagaagaagccaagaatccaaatacaagtgttcttttgagtcaattcagtttctacaaacactattatgaaagaaagaaagaagaaagaaagaaagagagagaggagaggagagggagagagagggagggagggaaggaaggaaagaggaaggaaggaaggaaagaaggaaggaaggaaaaaaagtaacaaaaagggaggaaggcagggagaagaaggacaaagcatcacatttggtaaaggaaatgggctttggggtcagatatgccttggctggtctacttgctaggcatgtaccttgggcaacagatttcgtttctctaaatctcattttatcatctgtaaaatgggaataatactagaatgcacgtttaccaccaggatgtgggtactgaatgcgaattagatttgcatctcattgttaaagtgcggtggcatttcaaacccaaacgggaacttgcagatcagattccagtgctttctggagctagaaaaatggtatatatgggcaaacgagccaggtggggcctgtggcagactggagagctcagacccatctcaaggggaagctgcttggccaattcttgccatctggggatgtggcccatgtcagacacatctcccattttaaacagtagttaggaatctggattgtttgtgaaatgtctcatttatgtttttaatcttagtaatagattccaatttttgaaactacaaactggggctgaatgatacatgcctgtaaactggacaaggcccaggtggtcaccagttcatggcctgctctgaacagaaggcgagtgtctagacagtgtcttcctgtcttataggtgccctggtggcatctgtagacatatctgtagtccaacagggctaagttcttacagatcaggttagaatattaatttagtgatatagctcatataagaaaataagaattttttaatcagttgggtcctggacatcgtgactggcaatgtcagtctggaaaccgaagatgtcaccaggaagaaaggacaaagatgtgtgagggatggagcagggaatagactgattttttttttttatggaaaagaataaaagaggatgaaatagaagaacaaaagattcagacatgcaaatcatagtattctagagaaatttctaggcccagaaatcatgaggaaaataatgttagtttctttttccaccctttccaatgagatttttcatgagggtaggaaagtacttctcttatagaattttacagctgaatagaactaaagagacctttagttttcaagttaaaacatttttttttaaagtaaataaaataagaactgcagtgaagaaatgactggtccatagccatggcacatatgaaaattccaaatgtgtatgaggtaaagctagggctttgcatgagtgagatagaccaggtgggaggttctacggaatggtggaaacaggcaaacaagccaagggtctggcccgtccaagggggctttgttactcagctgtagccagctgtgctaagcagaaagtgggcccaccatagacagatctaactttttttttttttttttgggatggagtctcactctgatgcccatgctggagtacactggtgtgatcttggctcactgcactctccatctaccaggttcaaacaattcttctgcctcagcctcccaagtagctgagaatacaggtgcgcaccaccacgcccagctaatttttgtatttttagtagagacggggtttcaccatgttggccaggctggtctcaaactccggaccttaggtgatccacccacctgggcctccctaagtgctgggattacaggcatgagccactgcgcccgactggcaacaggtctaacttttgaaggcaagagaaaaatatcaactttgagaatgcactccctcaatttttaaaagttgtcaacaaattcaaaagtttaaaacacatcatgcaagccaaaaaagcccatgtgaggtccacatttggctgggaacctgccagtctgtgacttgcattaaagaatcttccagcatcccacacattttctgacaaggtagttctcacctcacttcctgtcaatgtttacctaagtaaggaatgcttagtgtgatcattttcttaactctttatcctgaagaaggaccttcagtaaagacaatattttaatattttacttcggtttcctatattttactttggttgcctccattattcaccaatttgtgcttgttcagccagaaattcaggaaccacaggaaagctgttgactaaagaaaaccttaaactttcatcccagttctgttcactgttttttattaaagagttttctttttatagtaaactaaagagaggatgttcagagtccaggttcatgagctgcagggctttttttttttttttttttttttttgctcagcagaaccccaaaaatagaattgcaaaaatacaatttggtaaatctttaatgcccaaatactactccttcccctaactaagtcagccactggaaccatttctgcctctgcacatgacactgaccaggaggctaagcccattatttatgcacggctgattttatttctcaattcattttgagcatctttaatgcaaaacaacaagaaaaacagcagcaaaacacccagcctgattataagccttttctcctgacttttaatgcaaacttgaagaatgagccagagatgactcataaactcatgaacttcagtttctggtgaagaccatcatttaagacaaagtcagttccccagactgtgggtttccctatttagtgaacaaacatgtttactttaaaatgctaatcaaaaaagtccttgaacagacattgtcttccccaaaattactaaaatagttaccatgtttcaaattatttagaataggaaactaaattataataaaataattgaggatagaaatctaactgatttttcacctattaaaatttgggtcacaaattatacacacacatatacacacacacgcacctacacacacatgcatacacatctccaaaacacaagatagtaagcacgggaaaatttgccaaatgtcctagtggattgatcaacaaacagcccaggtaattctgcatttcttcttggtcgaagtcactttttcttcccaacttctcactcagactaggtacaactaaaatgtagataagtaagtcactttatctgtgttttatttaagcagtacggtggttaggtgcatgaatgctacagccagcatgcctggttcggattcctggttatgccactgttattggtagcttaatgtggagttggtaagacggggatgtggaaatagcagtgtcaattcgtaacttgcttaggaggattaaatgaatgtatagaacattgcctggccctgtgtacaaattcaagactttgagctcagttagtctggagagctagcagattcttaacctttgaatccccagctaaaaaccctgtcctgacgaacgttcatgcacattttgacggcctttcagagatgctcaggccttctctgcctcccttactccccaggctaaggtcctctactctagaaaacacctaaaggaacctggggatgtgagttacatatgaaaaccactttagtcctcctaaggacaccatacatattttctgagccatggcaaaatcaataggtaaacaggtattgttagagggaactaggcctggttcctttttcaatggggtttgaaagttgtattttgtttattaggaaggaaagaagtggacctttccagtgggtgattcatcatctggttccttcaggggaagagagggagtgactagagaggattgatgtccagcctggggcctgctttgctcaacagggacctcatgaaggcaggcttcttcctcctgacatttccagcactcctcacgggcactctggagagggatctctgaatcatcgctgtgtctagacacatcaaagggcaagctgcctgtttctcaggctcaccaaacccagtcaggagcactaacgtggcaggtctccctctgaatcactcagaccagagggagggcgctgagaggtgagcaggttcacccggctgtattcgctcttgggcgagggcaacattcctccctggggaatgcaaagtcatgttgcctcttgccaaagccagtcaggtaaggagacactgttgattttgtctctgcttcctggtgccagagcagaccaagcagggctttgaagatgttgattagacgtaagccttgacgaggaatgtgactgtcattcaacagtgtaggcactcagtaaatacccggggcatgaattcaagggaacgctaccttgcaaaatgggccactcacttcagacaagtaattgaaagaaacatttaaaaattccaagagcaggaaagataaaataattgctttgggttgctcttcggaagcctaatgcaacatacagttaagttttagacttcctgactattcttcacaaatttcttttcttcaaactcatgttgttcttatatctgaatgttctactgcatactctaatagatttgatttcaaccacatcccacacaaaatcatatttacacacacacacacacatacatatacacatatgtatatgtatgcagttgattatggacatagttttctgctttgcagatactttattaaacatctattatatgtgatattgatatttccttttcacatgttagaaatattttgttttccggtctcaaccattttttttttttgaaacggagtcttgctctgtcacccaggctggagtgcagtggcacgatctcggctcactgcagcctctgtctcccgggttgaagcgattctcctgcctcagtctcccaagtagctagtattacaggtgcccgcttggctaatttttttattttatttttattagagatggagtttcatcgtgttggccaggctggttttgaactcctgacctcaagtgatccgcccacctcggcctcccaaagtgctaggattacaggcgtgagccaccccgccaggccaggtcttaaccatttttgtaggccctgtgaaattctgatcctgaattaaatagccctaagattgtagaaatgaataacctttaatggagtgtatgctttttatggcctcatcaataaatgaatttattcctgacgttcttctaaggctaatcactccaaaggatttcagagtttatctacttgaggttatttacttgatacattgaggtggttccatcctgtaactggttaagtggatagtgtactgtttggggctgttgaagggaggaatgtagctttcattttctaagcaccgcaagagaaatggagaggaggtcctgtgtgtgccctgagatcccgaaaggggaattatgaactgcgaggagcatgtgcttcaaatcgtttgcaaatttgggccaatgagatgctctttaaaatgtcatcctcaaaagagggcatcccattcatgggtctctgtatgagcagccctaaaaagcaaagagccagcatggtagctcctgcctgtaatcccagcacttgacgaggctgaggtgggaggatcgcttgagcccaggagttcaaggccagcatgggcaacatagtgagaccccatctctacacaaaacttaaaaattagcagggcatggtggagtgcacctgtagtcccagctaccttaggaggctgaggcaggaggctcccttgagcccaggaggtcgaggctgcagtgagctgtgattgtgccgctgcactccagcctgggcaacacagcaagaccttgtctcaaagaaaaagagcagactttcatttctaattggaacaaaagcccctctaaaggcgctgacagctccttgtaggactcctggttgggtgatgttggaagaccagcattctcctgaggcaggaactgtgtctgcttttctgtccatattacactccccacaataagcacagtgcacggcacatagtaggtgctcaataaatccttttatttaccacttgtctggagtaaagcattataatgtagtcattacacgtgtggcttcggagcctgactgctggggtctgagccccagctctgccacttacctactgtgtatctttgggtaggttacttctgcctctgtcttggtttcctcatctgtaaaagggggataatgaaagtacctacttcagtggatgattacacttccttcacatgcatttacgagttttctgaacatataatcctgttgagatccatgtggacttgatgattctaattatttgtcatgcattacactcttcatgcttttggagttagaatgtatatatatatttataataattttattttcttcttaataaatagtgcggacatttggatcaaggaaaaggagtgtgtgtgtgtgtgtgtgtgtgtgtataatttttaaaaattgctggtaagatgtgtcaagctaagatttaacaatctgtgatctgcacatctttagtttgaggaaacaagtcacgttttatttcattttaattttaatttaatttaatttaattttattattattatttttttgagatggagttttgctgttgttgcccaggctggagtgcagtggcaccatctcggctcaccacaacctccgcctcttgggttcaagcaattatcctgcctcagcctcccaagtagctggcattacaggcacgcgctaccacacctgactgctttcgtatttttagtagagacggggtttctccatgttggtcaggctgtctcgaactcccgacctcaggtgattcgcccaccttggcctcccaaagtgttgggattacaggtgtgagccaccgcgcctgacccacattttattttttaaaatgtgaaaccgtatcttggtcatgtctttagcagcatggaattttggaaagatgatgacatttgaggaaaggaggtgaaggaagagacttgagtttaaactggcaccttctaatttctctgcccccaaaaaggtattgatatatgtgttttaattgttgccaatatgtgtctgaaggttgaagaacactcagagaaaaaaatgaaaaaaacacatgtgtttaaagtggtccataactaaaaaaaaaaaaaaaaaaaaaaaggtggtccataactgaaagcagcctggaaatggtcatggaggtcatggaggtagtgctctggggtgcatttcactaagggctacatcatcccttgaggtttgcaaagctggtagctaaggaggatgaggtaatgcagggatgttcatctggcacatttcatctcaagagctgatcatctttaggtcgggaatgaattcctcaccccatatagaatattacagagttggctcaggtggacagagaggagagggcaaagaaattttgatgttctcaaggccaggaatgttgcccttatatgggtttccttggaggagtcggctgtgtgtgcagcttgttccttacttgaggtgtatcaagacgttcaccacaatattcagtaattaattatcccaatccacatttaggaaacagcagaggacactgtgacattatctaacaatctctcaggtcactgcagatgaaactagctttgggacataggcctcaaagattcctgtgtgtagcagtagctcattagcccttttcaagagaaatattattactgtcaaatcagaagcttttgaagccttttggtgctattctgtctaacacataaaagtcttctacccagggaggcatagtatttggtttgtacagaactgtttctcaaagtagttacttcatttgccttcaaatttctcctctattttcaccaccacttaactgttggccaattggattttttttaagtttctttttttttttttagtttcttttttttttttttaaattgtcttccttaaaattaccagcatggaaaaataaactattcccaaatgcgtgatgctgtgaatctgagagttcaaatgcagcattagtggaggttgtggttgatgggcaagtagctcatatgtcttgggataaaatgctcctaagaaggaattttggccccattcacaggaggacacttttttcctcattttggctttttttttttttttcccccggcctggacacaaagtccctagtaattttatcacaactcattttgggaatggtgattcctgggccataattgatttcaggagttggtaactgggctgcaaatcaaacacgtgggagaaaatatcttaccagtattgtcgaagccctttggtttatgtgctttggtaataaaatcctcagcaggggagttcaacaccatcttttggtttctgtttctaggtttcttctttcttgcttgaggaatgggttagtatgtgggtttgtgcaggagattcagagagagggcctaagattccgcttaggcttcatggggttcacatctttcgatttggggcctatttgatggctttgctttattttaaagtgttttttgtttcataaaacttatttctttcttcttagaggtcatttgtagagattgcattaaggcttacagttttgttgtctggtagaatgctttgtcttctttttaaaaaaggaactggcctgctagcttggcattagtgtgtaatgatgacatcatttatttgtctctataggaaataggcattcattcctttttttttttttttcccagaggggaatgagttcatgttgagagtatatgataggatgtattctccctggttatcataagcggacgcattttttcatttacttggaagatctttctgaaacataacctgtgcaaaggactagggttatgggagaaattataacagacaaggctgctgttctacagaagcccttcgtctagtggtagtgggggcacagatgagcacacaggaaaatgcagaaagataaatgctaaagaaggaggccttacccaaccttgggtctcagggagacctcagggagggagtgacagctaaggggagatcggaggggtgagtaggagcgggacaggtaaagacggggtgggagagttaggaatttctgataggagagaacaccccacagagaaggaattgcaagttccaagtccaggaaagagaactttaattacatttttcaaagtacttatacatatgttatgtttatttattttgtaaccttgagttatacaactcagagtctcagttttcttatctgaaagatgggataactatccccatctccaggggagaccgtcaggaaaatccgagataactgacagagcgttcctcgttagctcacagctgtttacgagtgtctggcacacagtctatgcttcataaaagaaactgcctttactgttgttcttacattcttcttctctatcttaatgtttccctttgcctaatttgtcctacctatttttaaattatttaattttgcttgaagtatttctctctctatcttttttttaattgtagtaagaacatttaacctcagatctattattttaacatttttttaaacttttattttaggttcggggtacatacgcaggtttgctatataggtaaattcaccttatggggggttaatttcacagattatttagtcacccaggtattaagcttagtacccattagtgatttttcctgatcctctctctcctcccactcttcaccctcaggtaggccccagtgtcggttgttcccttctttgtatccatgagttctcatcatttagttcccatttataagtgggaaacatgcggtatttggtattctgttcctgtgttagtttgctaaggataatagcctccagctccacccatgttcctgcaaaagacatgatcttgctctttttcatggctgcatagtattccatggtgtatacgtaccacattttctttacccagtctagattttaacagatttttaagtgtacaatacattattatctatggatactatgttgaacagtggcagctctctggaactcatcttgcataactgaaactttattcctgctcaatagtagctccctgttttcctctccctgtagtctctggcaaccccccttttactatctgatccttagaagtcctcctcacacaccgtataggggcaggatatagtttcctaccccttcttaagacaatcacaggcaagagcactgtcacttacatgaccggttaagagtaagtagtgtataccctgtacacattgtgacagcagaaggcggggagattgaaagaattcagtaacacaggggttctgccagcacagaacagtgtccactatgatcttttttaacccaaatgcagcattatgcggagtttctctttattttaaagtgaaaactgtgatgtgactagtcacacctgacttcagcgcaccatctaatgagagcctctgtgtcagaatgaattgagctataataactactaaattgactcataaggacttacaccaaaaggagatctatcatcctacagaattagaaatgcagagggaggatggccctgaggatggttaatttagcagaaaccaacatcactaaagattcaggaaagttccatcctctttttccattttgatatcattgaagccgggagttcactttgtgtcttcgttttaaaaaccaggagaaccccagagccctaagaacaccttccctcacaattcactgaccagactcaaatcatatgcctcctactgaatgaagaggaataaaattatcagggatggccaaggctttaagcaagacacgaactctaaggatgccgatggtctgtacctactatgagaacctgatatctgaagttaggattccactggtaagaagaaaaagggattgggcaatggctagtgggatacacttatcatatctacctgatacacattttctttatatttatttgtgcaaaaagaaaaacaaattctctcccctttctgcttagaccagggaggtccaaggtatttggaaagaggagaggttatgccaagtaaaaacaagcccacaaacctccctaggagagacacacgcataccttccacatccggatcagggtgctgatgatgatggtgatggtgagtggaaaatctcaagttccccacatctgccaaagttggagcagctgctactaggagggcaccagatggtaggtccttgcttcctgtactgctcagagtcccagcagaaaacagaattccattcagatgtttgaccagagacttttttctttccttttgaaattatactttcagttctgggatgcatgtgcagaacatgcaagtttgttacataggtatacacgtgccatggtggtttgctgcactcatcaacccgtcatctacattaggtatttctcctaatgctatccctcccctaaccccccaacccccggacaggccccggtgtgtgatgttcccctccctgtgtccacgtgttctcactgttcaacccccacttatgagtgagaatatgaggtgtttggttttctgttcctgttttcatttgctgagaatgatggtttctagtttcatccatgtccctgcaaaggacatgaactcatccttttttatggctgcatagtattccgtgaagtatatgtgacacatttcctttgtccagtctatcattgatgggcatttgggttgtttccaagtctttcctattgtgaatagtgctgcaatgaacatacatgtgcatatgtctttatactagaaggatttataatcctttgggtacatacccagtaatgggattgctgggtcaaatggtatttctggttctagatccttgaggagaaccagagattttttttagttactatttctaaaggcatgggtaggttaagaaaactagcaagggaggatgagacacccaagactaaccaccgtgcgaagtcataaggaaagcttagcctgaagggccaagaagatgaaataatttttgcagatgctaagtgaaactgaggcagtgaaggaggggcctttgggaggagctgtagcctagaggaaggaagccagtgccagacacgtggccagagaggccatagaggcagggctctgatctctctcacttctcagcctctgatatccagctggtgcctgcttccattggctgagcccaaatgtaggcactggcaaaggagctggagcccagtgatgcccatgtggaaggcagcctctcggggctagaggagggcagagacggatctagttgggaggacaaacagatggatgggctgatgtgatcccagacacgctcctccaactagggcattctttctcaagagcctcgattccaggcagagccacatggcgtctcagagtcagtgaatccacccgcagtcagcaaaggagcgcctttggctttgttttgcttctgcatggcttgtcttttattcttctgctcagcacttctccttctcctcattttcctctctcctgcttttctcttctttgtcttctgtcttcttctttgtcttctgctcagtatctctctgattcttgaagcctttctcagcctaataagggccctaaacttccactggaatcatggagagctcttttctgtccttttttattttttagtgaataagagtcagattcaggtaggacaggtttaattttgaaacttgaaaaattgctcaggacttcctcttcaggatatgagcattggtcttaaatatcaaaagaaaacaagatttttggtagggttcttttagataaatgcttactacttacaacatataggaagaggaaaaaaaaaacaaaaaagtgataaacattataaatagtgtatttcttcacttcctttaaccatcatttgcatatttgtgcccagtgtccaatactaagtgttgctttcaccactcaagtgactcttgggacctgtcctgagagctgtggtttcaggctggatgcaatgaagtctttccaattgttatacaattgactgtgagctacttaaatctgccacttattaagaatgactggttatgaatcatcccagttcccaaatatgatgatgaatttgtgattactctgcaacagttttcaaaacaagatctcatacctttcatcaggaagagggaaaatggtttcattttcaacacaggaatttgtttccctggttgagacataaaacatgtgtcttaatggttctgcaatgtgctgggatttactctgaaaggatagtgattcacgaagagatggagtcgggtttcacatcctttgaagtctagggttgcccaattgcagtcatggagcaacatgcagctgagaataagagccaactgttcctgagtttgtctttaacggttaaacatgcctcatgtggtgtgtcaaaagcttataaattcataattggggcaaggctgctgtgggtttagttgccaataatgtgttgatgttgggttcagagtgcccaattaggatggaacataaagcaatgcatggcaacgaatgaatatgagatcactcatgtttcagtggaattttctttgaagatccacaaaactggagaaatggctgcccggataacgctgacatcaccatgtggccatattcagagggctgaagaagtcctgacaaactaaagtggggtgcttctgaagttccctaaataggattggataaagtgtagggatagagagatggtcacatgcaggattccttcccacctccttcctgtcatatcagaatacttgttactgtggctgaagtgacatttccatccagaagccaggatctggtttagctgtgcttgtcttccttcccggagctgagtcatgaatggcagtttgggatcctccaaagtgaaaggtgtcttttgttcagccactcgaggctgctctctcactgtgctcagttacagtttaactggcatttccttgtcagtactctgtgctgttgtgtaaagcagattcaagctattctatttgcttcttcttatttgtccactcacacagtcactatttatgatgatccttctatgatgaaggcactatttgagatgcctgaaaacacaaaagtgagcaagataaacgaggtcctttttctattctattcttgttgaggagctagataagtaggcaaatggacaaactaataaaataattttagacagtgctatgggatatgaaggggctaagaagggatgatggtgtaacataatttgtgagagttgcgcgatggccacattagatgaggtggttctctctgaatatgtgaattttatcctgagatctaaagaataagaaagagtcagcaatggaatgatctagaggaagagtgttctgggtaaaggactcacaattggaagagtcctcaggcagggaagagtgttctgggtaaaggactcacaattggaagaagtcctcaggcagggaagagcttggtttattaaagaaacaacaagaacatcaacagaatctgtgtggctctgctccatgagaaagagggtgggggataggggactatgtcagaaagcaatgggagctggttatgcgggccatggtgagaagttgggatcttgttcaatcataatccacccaactgtgttttcactccctatacttccactcttccctccctatactttctctcttccctccttatccatctccttatccatggtttatcactaaaatcactcccttgaaaatatcctgtcctttggtatgagttatctattgctgtgtaacaaattaaacaaaaaatttagcagtttaaaataagaagaatttgttatctcacacagcatttgtagatcaagaaaccaggctggcttagttgggtgattctgcctgtaggtatctcatgagtatagttatctaaagatcatactggggctgggggggttcacttccaggttgactcactcacatgcctggagagttagccctggtttttggcagggagccttagttccttgtcatgtgggtctttccataggacttgttgagtgtcctcatggtatggtggctgactttgcccagagacagtgagccaagaaaagggaaggtgaaagtcactatgtcttttaggatctagttttgaaagtcatatatcattgtcttcataatatctaagtagtcctaaaggctatccatactcagtgtgggagaggagaaaatcacacaagggcatgaataccagaagacaaggaccatggcaggtcatctcggaggcttgctaacacaccctatcaccctcctttgttcaaatcttgcaaaacctcagccctgagaaatctaaagcatggcgctaacatctaacccattgaaaagcataccaacatgctgagtgaactcattttaagttcatgaccacagacatcaaatgaaaccttagtgctgtctgactatccttctacatgcctctaggcaatttattcttttcctagggtgactttcccatatcttcatctcttttatacctggtctcattcttggccaaagtaaaatagaagctatcagaagaacaattctacatacttccaccaacaaattaccaacccagctatacccatatactctaccttctcacctgtcactacagatggtcagcttttgcttctatgtatgtgttttaatgtattagtccattttcacactgctgataaagacatacctgagactgggaagagaaagaggttcaatggacccagcagttccacatggctggggaggcctcacaatcatggcggaaggcaatgaggagcaagtcacatcttatgtggatggcagcaggcaaagagagagagcttgtgcggggaaactcccgtttttaaaaccatcagatctcatgagacttattcactattgcaggaatagcacgagaaagacctgcccccataattcaattacttcccactggtttcctcccacaacatggaggaattgtgggagttataattcaaggtgagatttgggtggggacatagtcaaatcatatcaattactttcatggggctgccataactaaatactgcaaactggatggcttagatcaacataaatgtactgtttcccagttctggagggtacaagtctaaaatcaaggtgtcagtagggctatactccctctaaacacgctagggcaggatctgttcaggtcttttttctgttttttggtggcttaggcattaactgtcttgcaaatggccatcttctccctgtgctcatcccatagtcttccctgtatgtgcgtctgtcctggtatccagatttctccttttataaggactctgatcgtattggattaggacttaccccagtgacctccttttaacttgattacatctgtaaagtctgtatttccagataaggtcacattctgtgggactggaggttaagacctcaacattttttgtaagggggaaggtagatgggggacacaattcaacccaaaagcttagactaatttcccatttgtatgctgaatcccattcctttccaccagccaaatggatctttcggcaattgtacctgtttccccctgcattatctatttttccctttctattgatcattcccatcatatagaagcaggatctaataacccccatcataaaagctaaccaaccaatcaaagaaacaaaaaacttgctgatcccacttatcttatttacagaactcaaaagaattgtctttactctatggctctactccttcccctttgctttctctgaagctcacttcaataaggctttaacctaccatgccatcaacatctctttggttatggccaaaagcactctatatattatcaaattcaatgggcagctctcaagtcttgtcttacttgacctgtcaactgtgtcatttgacacagtaggccactccttcctttttgaacccatttcttcacttaatttgaggacagcactctcttttgcttcatctcccatctcactggccattgcttctcagggtttagtctttgaaactcgtctctagatgctccatgccttgagtgatgtcacccagccttgcggctgtataccatccatatctacatacactaacaattcctgacctctttctttaatgccaggcttgtatattatgttaatccttcctctctactcaaatgcctgatagacttctcaatattttatgccctaaactgacctcatgatgatccttcgtgcatatcctagttcttttcttgtcttccctgtctcagaaaatggcaaattcatgatcctagttgcttaagctaaacccttggcatcatccttaattatctgtctctttttctcatgtctcacatacaagtatcaatgaatcctctttgctctacttccccaatacatcccaaattcaggcatctatcaccatcttcatcattgtcaatctggagcaagccttgattcaccttcgcctggactattataatcatcccccagttagtttccctatctctattcttgcccacctctagtccattccggacccagcaaccagaacatgtaactcaaaatccaccaatagcttcccttcttgataagcataaaatgccagctcatttcgttggccttcaaagctccccatgagtgcattcttggccacctctgacagaatcctgtaccacttattcctgtattccctccactccagtcacgcgagcatcctggttccttttttaccctgccaactgtgctttctgcctcatggcctttgcattcactgttcctttaatgaggaatgcccttcttttaggtatccacatggtttgctccctcatttcatccaggtttctgcccaaatgtctccttgtcagagaggactttcctgcccactctagctaaaatagcaatccctgtccaccaatattctccatttccttacccactttctatttcttcataacgcttatcacggctaggaacattttatatttatttgtttttttcccttacctctttaaagtataaacttcaagagagccacgactttgtttactgatgaacacttccttagctcctagcatggtatacagcacatagtaagtgttgagcaaatatttctttgtcagttaatgtgttaactccctgtttctctctccttctttctcttccattttcattctcttccttcctatccatttttactttttctctttctttttcttcacattccacttccatcttcatttttgcttcattttcagtttaatatcagaaaaacagattgattcaaagactttcaaaaggagaaaattcaatgtaatccttaaaattgttatgaaaattgttataaaaatcaaagcagaaccacccataatttggtggttaattttcaaaataaaaagcagctgaaattttagggctaattgcaaaaatgaataactagattaatccatccctgcattgttttaacctgagtttctaagacactgacttttcaaataagctaatataaaagaggggctccaaaaatttacccatacctatgacagaaagtagcttgcctttctgtgtattatttatgctacatggattaaaaattttataataaacttcttagtaaagaaagaaaatatctcatttttcctctacacttttgacttcttcttcttttttttttttttaaaaaaaattcccatctgctttaatgtttttctttggttaatattttgggatttgttcaacaaacttacttcttaataatgcttgattaagccttgtttgcaaaatcaaatatctacagatgtgggcaagaaacacaatcaagtaggctcagggtaaaaaaaaatgtctacagtttaggggcctgtgacaaactggagacacatgctttgtgtaaagggaatactatgaaagtcaaaacaaatatgggtgcagtacaaatttagctggtagttttttgacctctgacttaggtgactattataataatctggtagctgctagtccttatattcctagtagctaactgtgggaggaagtgcatggtatcgaagttacaaaacaaatattagagtagggaaaatcaaacttctatgaaaaataagtcagcaagtgaatacgtaaaattgagtgggtatgtatgtgtatgtgtgtgtgcatcttcaaaataatagtcaattattatgcagtgatgtactgtggctctctggaaacataagaaccacatacaaaatataatgggatgaatcacaaagtcggttgcaggtagacatatgcttgggtacaattatttttagggtattttctgcaaataatggaagttaaaaggagaaatctaatcaaaaccagaatcagcttccagacagccaacccatctcagatgtgagaactttttgttagctggttataccatgccttccactccgtggtgagatgatgaagatgcccctgggtgaactgcaccctggttttcttccgtttcgtatacttcgttcttgctttgtgcatacctgaaatccatgcagactggaacgcactgtgcacagttgtgtggtgactgacgcctgaccgcttcatcatgtgtcttagttcatctgggctgctgtaacaaaacgccttagattaggtcatttgtatataaccaagatttattgcttatagcttaggagtctggggagtccaagatcaaggcaccaacaaatccagtgtccgctgagagcttgttccctgcttcaaagatgccctcacatagtgacgggggcaagggagcccccttgggcttccttccataagggcactaatcccattcatgaggggttatgactcatgactgaatcacttcccaaaagtcccatctattaacactgtcacattgggtattaggctccaacatatgaattttgggggaaaccaacattgagaccacagcgccatggagctgtgctaagtgagagagcggttcctgtatgcgggggttttcgttaatgcagtaccatttaaagtgaggattgcttgtatcagtaaatcaagacagcttgtttttccatacctttgaactcaaacttacctaatgtttgctactttgatgtttgtttgtttgttttcagatactcatttagggacataaatcatcatagttgtaagcccgtgctccagggtcaaaaagaatattgggttcaaagaccaggtctgcctcttattgcctctgtgacctgtgagacgtttcttaacctctctaagcctctgtctcctcatctcaaaaatggagataatcatacctcacagctttgattaatgtgaagattaaagtgagatgctgcttataaaaaacttagccataataggtagcataacaattctcagtatatattatcaatgactccctttgctattactccttttattagtaatacagagcacagctactccttgaagtgtttcataaagtttggtgacactcttaacactcctgagaggtcaagcatacaattggcttaggttggaggaacagtgaacttggtggtcttgttgagccctggtcatgcataactaggatgccagatgcttcgacctgtaataaaaaattccccttgagcttggtagaatttggcaggctcaccgttcatccttacatgagccgtgtgagtcaagcactgggccagctcggcagaggcatcgaagttcaatcacagcgcaaaatctaatcaattctcacagtcaatgaatgaactgatgattcaggtatttatagcaaaaggtgtgaagagattatttggaacatggtggagggtaagaaacaggtataaatctattccagaatttcatttcttgtgagtcttctaggaaatgagatgaatgaacttttaaagaacattcattattcagctgagatttttgagcatctactatgtgccgggcattaggctagcttctagcaaaggagctgagaacaagactatgtgagcaccagctctcacagtgttcaaaatttatgtcaacatctatgctgagtgtgtagcccttattactcagcttggcactttacctttctctaagttgtcagaaactactagaaatttgaacggtttccatcaatgtattcaaatgaattgctttagtggtgggcagaggaaagatcctgttttttcctcccctaacacgcacatcccattaatcaacagattccttgttatttaataataaataaaaatacattaacttgttgaggcaaacatgtttcccaaagccattattaaaactgaattaccaacaacatggtttgaacagtaatatcatgaccacaagtcatttttctcagttgactttctgactggtgatacaaaatccatgggaactgtctgaattgcgaggcaaatattttagtaatgagtcgatccccaaaacaatttcaacactggaatggaaatttatacattccttaagctttgcttcaaagacaggtaaaattccttctgaattgggtaaatggaatgcattctataaactgtacccttttgttacaatgaacccaattgctcccgtcgttcataatctggcccagcaagccaattctttgttccattgctaatccatagtgcagattttaatctccaacaattagtaacccattcctacatatcttggaaagttcatgactgtcagggtaggcaatttttacgttgtgtatataggtctccaaagagacaatacatgtttgtggaatgaatacatgcttttaaaattcccatttcaataagtggagtttgcaggatactttaacatagcccagctgagaaaaattttagtgaaagaggaatctagaatagtagtttccaactgagggtgatatcatcccccaggggacatctgacaatgtttggtgtcatcttcggtagtcacatctgaaagagggtgctattggaatctagtaggtagaggccagggatgctgtgaaatattctacagtgcacaggacagctttcctacgatgaaaaattatctggccctaaatgccactagtgctgaggttaagacaccctgatctggagggaatgcttctctttctttcatctctctcactggggaagtcagctgtgttgtgagtaagctccagcagccctatggagaggtccatgtggtgaggaactaaggctccctgaacagcagtcagcaacttgtctgtcacctaagtgaggcatcttgcaagggcattttccagcctcggttgagctttcagatgaaagcggctcacgcagacacctagatggcaacctcatgagagattcccagccagaactagccagctaagccacacccaaattcctggccctcagaagttgtagaccagtggtccccaacctttttggcaccagggactcgtttcatagaagacaatttttccacaaatggtggggtggtgggggatggttttagaatgaaactgttcacttcagatcatcaggcattagttaggttctcatgaggagcaacaaccgagatccctcacatgtggagttcacaatagggtccacactcccatgagaatctaatgctgccccgatctgacaggaggcggcactcaggtggtgatgctcgcttgcctgcagctcatctcctgccatgtggccggttccttacaggccacagactggtactggtctgtgccctgggggttggtgacccctgttgtatgtgatacattcttctaagtcataaagtcgttagtaatttcttacgtagcagcagaaaactaatataagtaccttacgttgtatctacaccgaatggcttcattttattttcctgtattccggtgagtacaagaagaatggtgaaggatatgctttttgattttgtggagaaatgaagacttgcagaataaagcatcttgcttagttaatagagtcacaagccatttgatggagtacctgttgagagtatagcctaaggaagccttgactttgaagcccaaatctgccactttctagccaagtaacatctctaagcattgatttttaaaatatgggaacaacaggagcacctgtttgatacggttgctatggaaattacaagagataacaatgtaatgtgcttagcacaatgagtggctgatggtaaacgctctacaaatgttcattgaagaaatagttgttatgattacatgagtgagtgagttttttttttttcaactcaaatcactctgtttttctgtttcacatctttgccatttaaaggtttgggaatgagtctcaaagcccatgatttgtgatcttctggcattttgctgaggttgggattagaattatttaagttgcaaggtggcgtttggtggaactcagcgatctcccagctgcctgtgcagctgtctcaccagagccagtgaggcactcattctgggggcaaaatttagcagagtgccaaaaatctcagtactgttagggtaaatatttttatataatattttaaaaatccaattggcaaatgatggctaaccacctgtttttgtaaatgaagttttattggcagttcactactcacagctgtgaattcaataattcacatcacgctttttaagatgattattttcttaaatttatttttcgtttatatttacagtgaaatttttgcccttaagcaatattcatgtgtgcaagcaattgtgaggttaatggcacttatcccctggaatgggtctgtatgaatttggaagctgtggcaacatgttgcagacagcttatcatgaacagttgtggctggaactgataatgtcttctctcattgccaggctcttgatccttcctaattcatatgatttgcatccataattttggaactaaaaatatgtcttttaaacaagtaatatataaagagaaatgttccaaatcctatttatattttaatttattattttttatttccataggtttttggggaacaggtggtatttggttacatgagtaagttctttaatggtgattttggtgtacccatcacccaagccctacttttaattctaaggtgatagagatccaggattaaaaagaaggataaacaaaaagaaaatagaagtaaaaaaaaatagaaatcaaagcatcaactaatgatatggaaaaagaaaagccaaacctttgttctttgaaaaaactaaaaacaggcttttgttgagatacagacagcaaaaaaaaaatcctaagaataaagcaaaaacttctacaattatagatgttttaaaaaatcgtaagtgaatacagttagcaactatgtgccaataggtttataagtctaagtgagattgagaattttctagaaaaaaatgtaaattacttacactgacacagaaagtagaagaaaatctaaataaaccagtaaccatgaaggaactgaagtggtggcaaacatctgcaggcctgtgccagcgctggctccatcggtggggacctgagctgggtagtcacatggcggccccatgcttagaagtaccttgctcagggtttaattctttgctggctttgggtttaattctttgctgctactatcttaaaattctttttctctttctttcttttttttttttttagacaaggtctcactcttcccacaggctagagtccggtgacatgatcacagctcactgtagcctcaaactcctgggctcaagtgtcacagctcactgtagcctcaaactcctgggctcaagtgatcctcctacctcagtctccctagtagttgcgaccacaggtgtgcaccaccacacttggctaattttttttttgaagtttttgtagagatgaagtcttgccatgttgcccagggtggtctggaattcctgggctaaggtgatcctccagcctcagcctcccaaagtgctgagattacaagtgtgagccaccacacctggccttaaaattattagtttgttatattaccatatataaattataatatatgttacattatcaactgttaattatattatgaaaatatagtaacatattattaactaatatattaatatatattatagaattaattatagtatatattaataagaagccctccttttaattttgtgcttggccctgcaaattatgtagccagacctgtacatactggtatacttttataggtgagtttttcaactaattttacagtactgataatctaaaaacttttgaaaataggaaaagaaggcaaattacccagttcagtttagaagatcattgtaacaattccaagatctcttgatgaaagtcattcagaaatttggagataaaatgttatttcattggacctgccaaaatatgaataactgccataatcatttattacctaagaagtttgatattgacccttacagttgagaattgttgtgtcttcaaacgaagttgttttctaattttttgttttttctgtttccagcaaaaagtatgctagaatagcttatcctaaattcattctaggttagttgataagttaactattttaagctcttccggcatttctacactcttaaagtcttaatatgaatttttttccaggtcactcgctagtgaaccttggaaagatttggcaaattgacttaatgtttgtccaaagtcagactcagcttatttttccggaagctctaagttaaaaaaaaaaaaaagatggaattagtgttggaaatcttattaagaatacagtggaagcatacttgttttgttcttttgttctgtttctatatttctgatccagctacgttgtttctctataaggcgggcagatcatttgaggtcaggagttggagaccagcctgggtaacatagcgaaaccccatctctattaaaaatacaaaaattagctgggtgtggtggcaagcacctgtaatcccagctacttgggaggctgaggcaggagaatctcttgtacccgggaggcggaggttgcagtgagccaagatcgtgccactgcactccagcctggctaatagagccagactctgtctcaaaaaaaaaaaaaaaaaaaaaagggggctgccctctgtttcttgccacgagggcctccccaacacaattgcctgcttcatcaaaacagatgactattacaatcctttctcacgtaatcaccaagtgacatctcatcaccttcgacatattctattggttagaatcaagccacaggctccgccacacttaaagggaggaatttacacaaagctttgtttgcctcataaaatatcattcacgtattattttacttagggatcatcttttaaaacttgaacaaattgatttacaagtaaattttgtagtagcaccagaactttagaaataactggtattagcagaagataattgcaaacatacatattaccagcaataaaaattacttgtctgtgtaccttgaaaattcatcctgtgtataacttgtgattatacataagcatccttaataaaatgctgaaaaaaatcaatgtaatacacttaatataatgccaatcacacagtcagcccttaatcaatgtaagttattcttattacagatctattaggttggtgcaaaagcgattgtggtttttgccattacttttgcaccatcctactacaagtttggtctccagaatatattgtatatcggatgaaacacaggctgaacatcccttttccggcacccttggcctattgatcatgatcttctttcctggcatgcttggactcaacttcagaatgtttcttgatactgtgtttcaggcaactgccaccaatcaattggtgttggcacaatccagaggaccgctaccggtctccagtagatttcacctggtgtagagagatctgggccaatcataacagaaaaaaagcattaacaatacataaaatgaagggggaaaattgatctattaaaaagaaaacaaatgcagatgaaaaagcaaagcatttctttttcaagtatgtcatcaactctcaacttcatatttattttgtcttcctgatctcttttctcccacaatatgggacatcctcatcactttacctttctgctcaatgtgtgcaaaatatattgcacacccagttttatgaaagcacaacagattcgggaggagaaagtttcctctgtgcaaatcttctaatcaattctaaagcattggtacttgggagttgatgctacttgagaagctcaggtgcaaggcatcctgatgactaagggttctgcaaatattttattgctgataaaggaggttctagaggacaaaacaatcatggagaagcataagtgatattaatcacttattaggtcaacttccaacccaggagattaggaaaagctcaacaaattaggccaaatcataaaatggcaccttggctttcaaccaacagctttctcctgaatacttgctgatagattcattgactgacccatttaggttctttgagcaccaagaagtgcagggaaatgagcaagaactatgaagtcagacagactggggtttcagtccgagcctgcttgctgcatttccctgagcaagatacttaacttctctaagcctaattgaaaaatgagaagattcccagagatttggcaaggccatgggagaaattgttgggacaggttatagaaaaggactaaaatactcaaaatagattagtggccctaatcagatatttgtgcatttcagctttttagagaaatgcaatgagatgccctaaaaaccaaaggaaaaaaattcatagatttctagaacgtgcaaaatagacgttgaaaatgaggcgtgccaggtgctatcaagagtagaggctgagtcaggactcaatgttggggaccgaagctcaggccctgccccagaaaggattagctccagctgatggctttgtgggctcaggggccacacagaccaggacctctgttttttcacagaagccagaaatatgagatggtgcatctcatcccacaactgttaaatgttagtaaatctttaaatacctgctatttactgagaattcatcatgtaccagacagcttctaagagttttagtgcattgtttccattgattctctcaacaactgtatgaaatatgttttgatcattatttctgtttcataaatgagaaaactcaagcacagagaggtcagaatcacttccccaatgccacacagcagaggagctgggatttaaacccaatctatctgcttccagcactcagttcttttttttttcttgagacagagttttactcttgttgccaggctggagtgcaatggagggatcttggctcactgcaacctctgactcctgggttcaagcaattctcctgcctcagcctcccgagtagctgggattacaggcacacaccaccatgtccagctaatttttttgtatttttagtagagacagggtttcaccatgttggccaggctggtcccgaactctcgacctcaggtgatccacctgctttggcctcccaaattgctgggatttcaggcatgagccactgtgcccggcctgcacccagttcttaaccacctcgatacactgcctatttttcttttcttttctttttttttttgagatggaggcctatttttcttttaaattattttgacataatttcagaaaagttacatgaacagtacaaagaattcccatataccattcacccagattcttcaagcatttgcattttactactttggttttgtccttctttttctctctttctacatacacagacacacagacacacacacacacacacacacacacacacacacacacacacgtcttaactctgaatgctgagcttgcctagaagcagtaacatcccagtagcaacaagcaccaggagccaaaatctcgatttctaaatgttcttttctactgaaacaaattaggacttcttgaagaaacagatgattccacggtggggcaggtaaagtacaagatcagcctggaatattttattgttccagaaagcaggaagtgctcaaaaatggtaacaacatgtcaaaacaaacaaacaaacaaaaaaccagcaacaatgcacaggaacctatttaaagaggctcccattaatcaaatctggggcaatctgaatatcaaaatgaataatgacagtgtaaaaattataacccattcaaaaacataagaatctgcaagctcgcactgacataaatagacataaattataaataattaattcttcctgacagcacgactgtaatctcagcactttgggaggccgatgtgggcagatcacaaggtcgagagatcgagaccatcctggccaacatggtgaaactccctacatagctcaccacaatagcaagtttatatgcatttctgtgattatttgattgacatttcctccccttgttcttccccatcctccgtagtaggatacagatggcgtaagagcagggacatgtttattttggtttgcccctgtacccatgatgcttggcttacagatcttcataggcactcattaaatatttccttttacctggttgtcctagttgtaatgtttacaaccaccatttatggtaaccaataaagctaggcaaatttcccaggactcgtgccaagttgtaaatcctcctctccaaggtcttctagattaccaggtcatacagtgcctgtcacagggtagatgcttagtgactcagggcaattgtgattgtcatcagtaacacacgctgctcagtgctcgtagcttattatgacacctttctggtccctattctgtctccctcaaggctgactccatattttagctttaacaaaatttccagggatatttgtgggaaaccagtacacaataatatatatggaattcagtccagttggcttttgtgatgtccaaataatttttttgagagagaggaagggaaaaataaaaagagagaaaggaaaaaaaaatgaaggaggaaatggagagatcaaaggaattcctcaacgtttgtagcagggattctacagaccaggtactgctcccccggagagtaggaattatttatggggaaattacttacacaggggatggagtgaggttgcattatatgcacacttaacccaggcacatccaaccatccatgcttggagtggaaagatgactatggaaggatgtagcccaggtgattccaacaccctcactcaatgagaacagcaagatgagaaacgagatccacctcttgccttatttctcatgcacatctcaaaatgtgagctcctgatgcccttggtgtggttctagcatctgaggaagtgcatttttcatgtgacatggcccctagacataagccaactactttaggttgttttcacccactagagcagaaagcttttccaacaccggaaggaatcctctgtggattaaaacccatttatgcctagtgttccattagtggaacgctaagcttctgggagttattgaaatcccactgcttaaggtcatcgctaaggtctgatttttcacaaaaaaatttgcaacctctggcataaatgggttaatgagggatgaaactatgtgtttacggtatactttacagataattgaagggatgtaaagtttaccgtaactctaagaaatttttactctggttgactttcaaacctaaatccccagtgcgctttctcgctaatgaaacacctgtgagttccataccccttaaacttcatgctgatatagcaggaaaaatcctagattttattttattttttgatattgaatttcacttttttgcccaggctgaagtgaagtggcatgatctcggctctctgtaacctccgccccccaggttcaagcaattctcctgcctcagcctcccaagtagctgggattataagcacctgccaccatgcccagctaatttttagtacagatggggttttgccatgttggccaggctggtctcgaacccctgacctcaggtgatccatcggcctcggcctcccaaagtgctggaattacaggcatgagccaccgtgcccagccaaaaaacccctagattttaaagttgttaacttcaccaggttttaattctagaggagtcatttcccaactgtgtgacatggggagtttacttaacctctctgagccttagctattcaatggacgttaacatatgcgatgcacaagtgttctcatgaagatcagaaaatttgaaatgtacgtagctcggtgctgagcatagagcagggatggtgtccaaattcttatttcctcaatcagagaggcaaaagtcaaacaactccctttacaggggcagaacctgtcaaaagaaatgtgctgggcccaaatgggaaaaatgagacaattacaccatctgaaaatacaaacacgatcagttttacctacttgtggagcagaacctaagagacttatgggaaattaatttttttttaagtgaaagcaagtttattaggaaagtaaaggaataaagaatagctactccacaggaagaacagtagcatgggctgcttgattgagtagacttgtagttatttcttgatgatatgctaaacaaggggtgggctattcatgagttttccaggaaacaggtgggcaattcccggaactgagggttcctcccccttttagaccatataggggaacttcctgatgttgccatggcatttgtaaactgtcctggcgctggtgggagtgccttttagcatgttaatacaggaaattaatttacttttctgtttagagtcttcttgggactgatggagaatcaccaggacaattacaaaatacagtggactccatcaacccaatggtctaatcatgggaggttttaccctaaatactggaaactacaaatccacagattaaatttgatacatttggtttggttcaaatctagttgccaaatagtgatttttctaatcccatcaattttgtatacttttatttaattaatttattttttgagacagagtcctgctctgtcgccaggctggagtgcagtggcatgatctcggctcactgcaacctccgcctcctgggttcaagcaattctcctgcctcaggagaatctgcctttctcctcccaagtagctgggactacaggcgcgtgccaccacgcccagctaattttttgtatttttagtagagatgagcagtacatgacgtgcatcccacaggtccgggaaccaatctatctttgttggaatcctggcttccctacatactaactgtgattctaaggagattactgagcacctctgtgcctcagtttccccaggtgtgaaatgggaagaatgatcacatctacttacagggcagtgacaaggatttgtgaattcatatgtagcaagtgcacagaggagagactggggcagcaagatcagtcaataaatattattatcatcatgaccacattggccatgtcagtgtcggctccaggcaacctgctcagggaggtgaggggcagcagacgtggcccttgctccaccctgtgctcctcacacccatttgccggtctttgtgcccttcgcccaggtttttcatgctttgctcctcatggctggcacctgcagccttcttcaaagactaccttctggctactatagccattttgcctggacatgtaaagtctagaagtatcttagagtttataccccaaggtgcagcctgaactgaaggagtgtggaagccctgctccctgggcacaaggagaacaaactgagctgcaatgtacactccagagctcccagagatcaggctgaggctggaacttcactcaaaaccacacgcttgtttggcttctttcccttcctcatcctgctgtccccacagtcgcacaggtctccttgggaatcacaaccctaatgaatcccggtgctggggacagcccctgtgggatctaagtcatcaaggaagatttccttcaggaaatgaaagctgggtggacgtagatggtgcgtaggagaagaacaggcagagaaagagcatgccgggagggagacggtgggaagaaccctcttgctagcatttaaggaacagcagaaactggcagaagccactgtggcctggttccagaggcctctgggggtggatgatgtgggctgaggcctgggggatcagtgggacctcagttgatagggcctggaagtgtggattgcagaatcggatctttacgtaagagcaatgggaagccccagaggcaggatgaggcatgatcaggtttgggtttgaaaagaccagtaaggcaagtgtgcaaagaacagaggggaaggaagcaagagaggactgagatcagctgggagctcctgcagagactagagatattagtggtccaggcaagagattgtcagtattgctcccagccacggaaaatttggctgttgtaggtctttcattgtgaaatgtaaacttattcttgggaattaagtattcaaacagtgaatgtggtaggcaggggctgaaatggttcgtaacctctacctgactgccaagtgccagcctccctttcatgtcatgaaagatacaagagagaacaggctcccaggccgttctacccccctttcaatcacacaaccagtgtgtgactgattgtgtgattggaaagggggtagagatagaagtaactggacttgggaaatatttaagcagcaacaaaatggaaagttattttgcaattacaagaataaactttcagtaaaactgctattaaagtctagatttatctaagggtaaattttgtgatatagggcttgtaggccatatgagaaaattttctaccagtaaaataaagtttgaatttgtttttattttgttgtaacaaaggcaataaagaggggaagtctctcaaatatttaaaaacttttatttttactttcagagaatttgaaggtatacagatgaaatctgacaagacgtgaatttataattctaaaaataatttcacagcagagagaaagcatatacctagatatgtacatatttattacaatataaagacataaatgtatatttctgaaatattctaaaaatataatgtaggaagaaatatttatcaaatacacagaattatatacagtatgcatttaggaaaagcagtagtaaaaatatgcacaaataaaccatctgtaaacacaatttttaagtcttataagtattgcatgcatttctgtgcattttacatttatgaaatcatatttttcctaggagttcaaatcacaaaacaaatgttatataacagatctctaacttttgcatgctttacacttgtcccatttaatagacagaaaaattatggcatgggaaatcattttataatattaaagtcacactgaatgtttttaagctgtgactaaactttgaaacattgccctgcaccacagatcctaaatcaagtactgcaaatattaaaaaaatgactgaggcaaattaccattagaacccacacacacatacacggacacacacacacagacacacacacacatgcatgtctgtgcttcatatgcacatacacaatttaaaaattattgcttcatctttaccctaatgccataaaggaatcacatttaaaaaataaacaattttaaggtcctctaacaaaataatgccccagtgaatcactagtcttataagttgtttgacttcgttaaagtccttttaaaaatagaggtgttctctagtttcccaataatgtttttatttcaatgcaggaagaacgcaatttcatgggaggcctgataactttaaccatcatttagcttggcttacattattaagcagggacattttcctaagtagtacattaagcagagctacagtaaatggattgtcagtattactcccagccccagaaaatttagctgttgtaggtcattcattgtgaaatgtaaacttattcttgggaattaaagattcaaacagtgaatgtggtaggcagggcctgaaacggtttgtaacctctacctgactgacaagtgccagcctccctttcatgtcatggaagatgcaagacagaacaggctcccaggccattctaagcacctgaagatggtgctgacacaggtgaagtgtaaaccagcagtgaaccctgtagaatgccttggatcccagcactcagtccgcttccctgagttggatatgatgttagcaaataccaccatctagaaagacagtacagcttctggaacaattttgcagaagaaaaagtatcaacacctgggcctaaatattctttataagctgttgtatggtgtggtgtttgaagtttgctttccggtaacgtagaagccataagcaccattcttgcagaaaagttgaaatggctgttttggtcttggtaaaaaaaaaaaaaaaaaaaaaaaaaaaaaaaaaaaaaaaaaaaaggtataccctaattgtatatcaaagaagtgtatttaaacaagacaaattattagccaaagaaaaaatgctaaaacttaaaaggtgtggcttactgtgataaacatgcatgctctttgctgaaggctggggtgtcacaatgcagctagaatactttccttaccctacttgattcagttctgttggttgggatgctcagaatttgacaaatttcataatagcatcagacacttggtggaggaataataatgtattcatttgggccttgttcagaaatttcatctgtaattgcatgtttctctaaataatctaccaataagcaaatgctccttaacttgccattggcaaacagcatttttttctaggaaaatcctagaaggtgctgctaaaagaacacaatgatagaatccgggtttaaacaccgacatgtcagcctataaagccatatgttacaaatgtcttatttccaccaccaggggtggtggctcacacttgcaatcccagcactttgggaggccgaggcgggtggatcacgaggtcaggagttcaagaccagtctggccaacataatgaaaccccatctctactaaaaatacaaaaaattagctgggtgtggtggtgtgcacctgcctgtaatcccagctactcgggaggctgaggcagaagaatcgcatgaacccaggaggcggaggttgcagtgagctgagattgcaccattgcactccagcccaggtgacagtgtgagacactgtctcaaaaaaaaaaaaaaaaaaaaaaattagggccttcttaggctaacttttgatcacttcaatagttttgaattcattgtaatgtctattaggagaacataactagacttactaactcttaatttcattaaggaaattattactcaggacgaggccaacatatgctatttggcttatgttatttaaaggaaataactcagtagtattgaaataaatagcacctggttggtatatggacatggcaaaagttgtggagggaacatgagaactcctctattgtcagaaaaagtattgaatggcatactgcagaaaaaatattctattgtgttcaatacaggctgataaatatatacatttatattacatgtggttgcataacacaaacctagaccctagggctaaatacagtccaccgcttgttttttataaaatttatcagaacacagcctttgtaggcagaataacagatctcctaaaatgtgaatgccctaatccctggaacacgtgaatatactaccttatatgaaaaaaagggctttccagatgaaattaaatttatgaacttggagatgggagacatgatcctggataatatcttgtcagacagaagcaatgtaagaagaaagagagattcaaagtgtgagagggactcaaccaaccattgttactggctttcagttggggaaggtttcatgagccaaggaatatgggaaatctctcaaagttgaggatcgccttcagctgacagcagcaaaaaaataaagacttcagtcctgtaaccatgaagaactaaattctgccaacaaccaaactagcaagagaatagatcctcctctagaacctccagaaagagccccgacaacacgataattttagcctggaagagcctcatcagacttctgacctatagaactgtaagataatagatgtgtgtcgtgtaactcactaagttttagtaatttgcggtggcagcaatagaaagctaggacatcagctcactcattagtttacaaattgcctgtggctgctttcatgttccaaggtagtattaagaggatgtgacaaagactgtatggtccataaaacctaaaatatttgccaactggccctttacggaaaaagtttgccaacccttactattcacatgcaaaaaccatgaacagctgctagcatttactgaacacttaattgatgccaggctcaggaataactacttggtattcatattaaatttttgtgatacactctctttgggtcatcattttacaaatgaaaaaaaaaaaggaagtagagagtttagggaactgctcaaggtcacccagcaagttagaggtgagctgggattcaaaccccagtctggctgacttcccagcatagctcatccctcgtcattctcactaccttgcagaggataatgaaccgcctagatgctcacctgaggcgtattatcgctggcaaaacgcgatggggagttcccggctgggcaccagggtgcctgagtgtagcatctcaacaggctcattgtctgtggcctggatgtcgtatttgcggacaatctgtaatgcacacgcacacaaaaacagaattacccctctcttcttctgccttgtgaaacagcacagaacataattgcagaaaccggtaaaggttttacccaacaaagagccaaatgcagttgaagctctgctaatcggcgaccaatgcacattctttttccaacgccaaatggaagatgcgcaaaaggattaattttttccttctcctgaagccaacgttcaggtctaaactgacttgaatcttcaaaattgtcttcactggatcccaacacctgggtatttagcatgagcactgtctaaacacatgcagagacacatagtatttaaaataaccagaagagacctttgaatggcaaaattgacacaagttgtcaccttacaaatcaaaagccaaatccacaaatttataataatgatggttgccaacatgcgctgagtgcttaaaatgtgccaggtaataaataggtaaagggctttagaattgtgcaccatactcacaaccaccctgcgcagcagattctgttattaaaccccttttacagacgaagttgaggctcacagagattatgtaactcactcaagacaacacagataaaagatgaaactgaatgcaggtctctgtctccatagccgtgaattctaattctatactatgcaacatgtcaactattctctaccatctctgcattcccaaaatgaatattttccagtacaaagtctagggagatctggtgaatatttgcaaagtgtatcttccaaggttttgtaaggtatagaatatacaaattctacttactcctttgggtaaagcatattcacccagaactgttgccttgtcaagagtccgagttgtaaatggtacactcggcgtaagcctgaaaagataaaatcaaagatgtaaaggtgagcacagtctaagttctctctgaagtgtcaatgggaatgcagattggattaaataaatgctgcccaagtgcatactcaaagaggcagcatgatcacagatcttcctaaagaagttgtttttttcttctcaataattgtatctcttgttcctctcatcttcttgagttagttaaaaccccagtgcaaggctgtttagtaaactgttaacgttggttttcccccttcattccagactaaaatgtgtatgtttccgtgctagcccttgaagcgtgatgtttgttctatgtttctccaatctactcttcacaaagttgacagtatccttctaatcctaaaatgttgtgagttttgttttcccaaaaggatgtaaaaagaatttccaaaaaatgttttataccagaggctcaaaagcaaagctttctctgtgtcctattatataataatatagctcttttgtgagcctccatctcataaccttcaatcatgcccctatcttaattagtgcttacagcgttcattagagtagcaagattattgaattaaaggggagggcactggctttccaagatttaatagaatttgcccaaatgatttaggaaatgagtgccagaaaagaaatatggctccaaagatttttttgcagtgtgataattgtttctaattagctaggggaagccgcccatgagtaggggaccacttgttttgtgtttacgagaacagtgttctaacacatttatattggctcagagataggctcttacctcatagattctttcagacaggcttttaaatacggcatattcctcaaatcttctgcccgtggcacctgattctcaggtaatacactttgaatttccttaagaagcttttgttgcacttggggattacgggataaattgtagagaatccacattagactgtttgctgtctgcaagccaaatggacataaacttgagtttttgtaaataactgcattaaaccactattagctgaaaaaaaggtgatgcccaccaccttattctgcaaatgtatcagtgaagctctttcacgcgtccttatagctacgcctttagacaaatccaatatataaaaaagcagacttatttcataaaacatatcaattaaggatatattttaaattatttactgagggaatcaaagtataatcctttaatcagctgctttagaacatttaaatacagtttttttttttttttgagatggagtctcactctgtcacccagactggagtgcagtggcactatctcggctcactgcaacctccacctcctgggttcaagcgattctcctgcctcagcctcctgagtagctgggactacaggcatccaccaccatgcctggctaatttttgtatttttagtagagatggggtttcaccatgttggctaggctggtcttagactcttgacctcaggtgatctgcctgcctccaaaagtgctgggattacaggcatgagccaactgtgcctgacctaaaatacagtttgacgcaataattgttcgaacacaaatgagtacatgtaaaattggtgaaatgagaatattagtgggttaaatcaatgccaattttcagattgtgacaacgttttctcgttagacaggacattactattagtggaaaactgggtaacggatgcaagggatccctttctattttttcttagaactgaatgtgaatctacaatgatctcaaaataaacatttaattaaaagttgcttgatataaaaaacattcatataaaaatggagtaaacagagagggatggtgatcctcagggtgttgctaatgagaggctttaagagaatgttatagtggaaatggacaataaatggcatttctgaaatttaaaagttcctttggccacaccctaaaaagtcaccacaaaaataaacaggcactacctacactgagggttacaaccacatgtaaacagccctcatacgagggtgccaacaccaaaaataagaaattcaaacattgagctgagtactccagctacagtttctgacaaaggcccacacccttttaagtggcatcttttatttcctctgcacaggcaatgactagagaaaaaatattggtggaaacagccaatgtagctttaagctacataatattcaccactagtagtcatatgtatttattttttaggccgtactttgctaatttaagccaaatatttcctgaaaatgatcattgtgtccacctccgcagacatgaagacgctgttgctaagtgccatgtgccactcacacaaatgagcaccaagtgcaagaccattcagagatgatggttattttattatttttggaagaagatgcctccaaggcagtcttcttcatgtcagaggactggcagcctcggctgcaaataaactgtagatgccattattataagagtctaatttacaaaacaggaagagggtgtagccatcaaattagatacactttcaaatggttctgattttccaaatgtgactttcagaatagccaggaccaaaaaagaaacagatttaaccatatcagtgagtccctcaccgcaagtaccaaatagagtttccaaagggcagatgactgtagcttttaccaaagccacgtaaggcagtctgagcctgtagggaaaactgcaggggctaagctgcagcagctgatttgaggggaagtggcctggaaaacctcaggggcacaaactatccttgattgacctccatggaacagaccaagctcattgactggcctgctgtacccactctcttggctaagtctattctccatccaccagccagagcccacttttaaaaacataaatgatcaggtgattcccttgcttaaaatgctgcaagagcttcccatcacaggtgcaatcaaatctaatgccttacccaggctgggctcacaaggctctggctaacatggcccatccaattctccagtctcagctctgaccacatttactagttctgtagctccatccctctttctgccccagggcctttgcatgggccgtttcctctacctgcagcgctcttccacgaggtctttctgtggctggctcttctcattattccagagtcagctccagtactgctttctcagagagggcttccctttaatcatctccatctctctatattacaccatcctgatggcgtcctccacaatccacaccactatctaaagtgaccacatttgtttgtttacatggctactgtctgtcttccccacttgcatacaagttccatgagagtgggaacccttgtctctggttcatggtggtctctcaagaacctggaacagtcccaggcatacagtaggcactcaatagttcctgaattccttcatttattcaacaagtatctatcagccgctactagatgccaagtactgttctatgtcctggaaacacagcagtggacaactctaagccattgccctcagagaggtcacgttccagttgaaaaaataaaagaataatgggtgacactgtactttgatcactggaaggagccacccagggtaagcagttcaacaggaaagtgagcgaggatggattcccactttcaaccgccttgtggagcaggaggagaaatgagaacctcgctatctcctgatagagaaaaccctacctttacttcaggcaagaaacagcacagaaggggaagcacatggaaaataaacaactgctttacattttgcttagagactttaaggtgcatgaaatgttggacttaggaggaggttagcgtgcgccactcccatcacagctcgaactagtatccaagtcaattaaacctacctgaatgcctatggcaggatttgtttggggttggtctcacttagtatctgctatctcctagggagtatcggccacatcagagacagaattttggtctttacaatgagctgttttgcttcagttaaaatccacttgtcccagactctttgggactttgtttacaattctaagcagataaaaatattattggcttgaaagagagtatgccttttttttttttttttttttttttttttttttttacagtaagtaacagccacagttaggcactttggggtaacatgtgcaactgaacaaaatacttccaattttgaaaaatctggattctgtatcttgccagggcagagaactttactgctcctgaactcccgtagcagtttgcatggacatcatggcactcatcacatcctactctggctttttgtcactggggcacatgaagtctcctcctacccagagtttaagcacagaagcccgtgcatggaggcaccgtggcgtctggtatgaggccgtgcgctgaggcaccgtggcatagatgctgtgcgcggaggcaccgtggcatctagtatgagacttttcatttttgtggagttgatgctagtgaatcccagtgaaatgaatgagatgaattactatttaaaatctgtcatctaaaaatggtacagaccgttcatttagcaaactcaaatccagcccacccttaccgtttccaccgcagccagctggagctctgtgacagcagcatacaattctttctttgaaagccgattctggtgataaatgtcacaaaggaaatctgcactaggctgctgagaatacttctctaaccggttgtcgatacaagctttgactattagagcagagaagaaagagaggaagtcagctgaaaattgggatgaggaaaatcacagaagaaaacctcagtccaaactccttcttgcaatatctaaatagtcttttcaggaacactgacaatttgctacacacactaattatattattgccttcttgtcaagtcggcaaggatttttcaataccgacatgagcaaggcttctcaaactttaatgtggataggagtcacctaggcatcttctcaaaatgcagaatctgaatcagggcttgggtaggcctggaactctgcattcctaataagcttctaggtgatgctgatgccactgggctgcaggtcatagttttgagtagtaagagtttagatcttgggagaaaaaagtgtaaaagaaggtaggatttgggttcactttcagaatccaacttggacccagatattactaagcacacataccccacatacatacgcacaagtagagtgtccatccatgttgacaataatggtaaaaatttctaatatttataacataaaatctaggcgtgtacctccctcactattaagcaaacaaccaccaggctcattatatggtaataatcatgctgatcacatatggcacagcagttagagttcgagtcctggaagctccttgtctggcttcaaaccttggctttgccatcacctagcatgcaatcttgggaacgttggctaacttctatgtgtctcaggtacccctctcagggctaataaaaggacctaccttataggtgtgttgtgaggattaactaaatgtgtaagtgaacaatgcctagcatcaaatattccccttcgtcatgtggcagaaatagatctagtccacggagatactgtgatatgccaggtttttatgttaactgtaatctgtagtagacccagaaacagttacattgaggtaggttctcttattattattattaattattagtccattttagagacaaggcaactgaggatgaaaaggtgattgcacatttggccaagccaccacaaccagtgacagagctgaacttgaactcaggagtccctgactctataaattttacttttttattttgagatggagtctcactctgcctcccaagatggagtgcagtggctcagtcttggctcactgcaacctccgcctcccaggttcaagcaattctcctgcctcagcctcctgagtagctgggattacaggtgcccaccaccacgcccagctaatttttgtatttgtagtagagactgggtttcaccgtgttgaccgggctgatctcaaactcctggcctcaagtgatctgctcgcctgggccacccaaagtgctgggattacaggggtgagccactgcacctggccagattttacttttaaccactcttaattcccaaagaagactacagaaagcttgttacttagaatttgtgtatgctggggcaatccccaaaacacctgtgtttgcaaaacctaaatgtggtgatgaggctcaggagatcactccagacctcctctctgaagctccagacacgggggtgctgggctggttctggctggttgtgaagggcggccctttacctgatttgaaaatggtgtcccaggccagagtgtggtcctgccagaccttggtgttgaggctcttgtgcagctcgactggagtgaccatcatcctcccaaacgtgctcatcatctgagagaaatgcaaatgcctttttattctgaattctccttctctcaaagacaatgttcgttctggaagaggaacattctaaaccgcagcaccctgcactttttaaaaggctggaattacaaggacacccccggctctctctgcaccggtcctgggagcaatgcccgtaccccacctccacctcctttcaatattgaaggtaatgtgggggatgattttccactggatgtgtttgataaaaattgtaatcttatgacctaattgtaaaaaaaaaaaaaaaaagaggaaaaacgataactttcatattcacttcaatttctaataatttccaaacttcagtgatttccaaaccaatttcacagcgtttatcctatctacacgccacccaaactattcaaaaagataaaatctgaaaaattttgggctctttttaaaaagtatttttaatcaactgatctttaattaaaatagctattttaaccttgcctaaacaaagaaataatggatttaatgtgcttctttatgttacgtgcatatatccaggggtccccaacccccaggccgtgaaccagtactggtcagtggcctgttaggaacggggccgcgcagcaggaggtgatcagcgggccagcaggtgttaccacctgagctctgcctcctctcagatcaatggctgcattagattcttacaggagtgtgaaccctattgtgaattgcctatgcgaggaatctatgttccacactccttatgagaatctaatgcctgatgatctgtcactgtctcccatcacccccagatgggactttcgtgttgcacgaaaacaagctcagggctcccactgattctacattatggtgagtatataataataacagaaataaagtgcacagtaaacgtaatgcacttaaatgatcctccctcccctgccccaccaccctgccctgtccatggaaaaattgtcttccacgaaactggtccctggtgccaaaaaggttggagacagccgcatatatgcacataaatatactaaaatatataatgcacattaaaatgaacacttaactattgaaataaaatatgtgtgtatgccattttttgggaatcactgtgaagttctgtaaaaatcgatctgtaaaacatcaatcaagaaaactgctttcttaaagaggctgcttactgttttgatggccatgatgaagttcacagcttcatcccctgcattcttctggagaagcccaaatctcttctcatacaacacgaggcagatacctgtcatttaaaataatcatcactttacacaaacagcaatgctggagttggagtctatgtttagctggttattaaagactcaattctatgcctcttaaaagtgtgggattttctgagaaaaggcaacagtccaagaatattgaggaaaagcagagtctgagagaaaggggacaccatcactttctttttctagaaattatctccaggtccaatgactcatcacctcagagtgtcatgatcagagatccactgtcctgatcaagtcacacaggagatccaggggccctagcaaaggtgctgcagggtcgggtctgcactctgcctctaacccagctgtgtttttagagtcacttattggattctatctcctgacataatgaattggaagccattcaccagaggaagagaagggaagggaataattatgttctaaacacccattacacgccaggtactgggctagcacttcatatagggttttttttccttccatttcatcattttatttagaaggaacctttttacaaataaaattctcaactcttcatttcaaaactttttacctagagaaaagttgaaggaatggtaaaatgaatacctgaatcccccgaactcatcaacatcttgctgccatttctttctctttgtgtgtatgtatgcatacaagtgtatacgtggttgtgtgtgctgaagcatctgaaaataattttgagctctcaggtcacttcaccgttaaatactttagcagtaatgtcctaagaataaagcattctccaacataaccacaatgtcattaacatccctaagaaccttagcgaccattccataaaaaatctactgtgtcccattttaaaatgttccccattgtcctaaaaattatctcttgtaaccttttttttttaaaaaaaggacacagggccgagcgtggtggttcacacctgtaatcccaacacttcaggaggctcgggcaggcagactgcttgagcccaggagttcgagaatagcctgggcaacatggcaaaacgctgtctctacaaaaaaataaaaataaaaaaattattcaggcatggctacatgtgcctgtagttccagctactctggaggctgaggtgggaagatctcttgggcccaggaggccgaggttgcagtgggccgagatcataccactggccactgcaccctagcctgagtgacacagtctggaaaaaaaaaattatacaggattactgcaaccaactttttagtggtggataattggctcttgacttataaagtaggagactagcattaaaaaggtaaacaaatggcctaaaatcataaacctgaggagtgagagtcaattagcttagtcagcacccacccacagcttttccaactacctccatgttttccaaactctacttatttcttcccagcctttcaaggtttccccgtatttgtgttccacagtggttggcaggtacaccactgggaatatgtgagatagctctggatggtacatgaactttaaaaataattagttactctgctgggcacaatggctcatgcttgtaatcccagcactctcagaggtggaggtgggagcatcatctgaggtcaggagtttgagaccaaccggtggcaaaaccccatctctacttaaaaaacacaaaagttagtcaggcgtggtatcgcacgcctgcaataccagcactttgggaggctgaggtaagtggatcacctgaggtcagcagttcgagaccagcctgggcaacatggtgaaaccccatctgtactaaaaaacacaaaaatcagccaggcatggtggtgtgcacctgtagtcccagctgctcaggatgctgaggcaggagaatcgcttgaacccaggaggtggaggttgcagtgagccgagatcacgccgctgcactccagcctggggcagagtgagagtctgtctcaaataagtaattaaaaaaagttacttatatttatctatttatggcaatatttctgaccttgaatttatggaagtgttataggttttccttctatccctcccatcagcagccacagtgatcctcccagtaaatctgcccatatatcacactgctgctgaatacattcccgcagctcccggttacttacaggctaaaattcaaactcccgctcatacagccctccatgagctggctgctggccctctgccagcctctgttacaggatatgcttgtcattccgcacttcttctgcagggacactctccttcctcccttttcacctggtgaactcctactcaaccatcaggacttagctgaggggcaccatctctgtgaagcgacccctggccatgtccggcttaggtggccctctcagattctcccacagccctgaatgtcctcagccaggcgctgtcccacctgatcacagctgcctgctctcctcttgcacccccatgggcagtgagctctgccctttatttccagagtaatctttgaagaaagcggtcatgtcctccctcccttacttgccccatctgagtcagatgagaggtaaagtcttgccaggacctatgagctgtgccctgttggacacctgccttctttttgacctcatctcctttcacaggctccccttcctcccagcttgttcatcgtgatccactcacaccagcagcttgaagttcctcaaactcggcgctcatgcttccacctcctggcatttgcactttcttctctgctgcctggaacaatcctccacaggtaccctcatgatttgctccttcccttcctttaggacttacctcaaatgtcttcttactaaaaaagacttgcccctctttcattctttcatgttatttctttctctctctctcttttcttctttatttcttttcttttttctttcctttctctttttcttttccttccctccttccttccttccttctctccctccttccttccttccctccctcccttctgccttccctccctccctccctccctccttccttccttccctccctccctcccttcttccttccttccttccttccttccttccttccttccttccttcctttctctgtctctctctctttcttgagacggggtctcacactgtcacccagactgcaatgcagtggtacaatcacggctcactttagcttcagcgtcccggggtcaagcaatcctcccacctcagcctcccaagtagatgggactacaggcatgtgccaccaaccctgactaatttttgtattttttgtagagacaaggttttgctgtgttgcccaagctgttctcagattcctgggctggcctcaagcgatctgcccacctcagcctcccaaagtcctgggattataggcatgtgccaccatgcctgcctttcatgttctttcttaactccctttctcttttcctttactccttggaagagtatattttaaaatgtgtttacttgttgactgtcaccttgtctagcatataagctccccaagggtacaggggttatgcgtttcattcattgtcatatccctagtacctagcacagtgccagacacacagcaagtattcaacaaatgtttgttgtatgactcattaacaatccatagttcaaggcataacttaagcacctaaaagaagcattaaaagggctgctctggcctttccctaggcagcaataatgcctgtttacaaaagagttgtcaaaagagccatgttttatccgcaaaatcacctgcaaaatcagtgagcaagtctgtgacgacaacttactttcaaacgaccatttgttcagttcgctgtacaagtcttcaacgtggcctctttcatcacagagctcatctattctgcccataaaatcggccaagaccttcaaagaaaacaaccgcaaaagacacattttaaagccgttgaaggaaaacaaaactttaaagctcactgagctaacttcaggtcttgctacatcgcatattcactggccataatgttattcatcctgaagtcacactaattatatattctccctgggaacccaccttatcccctaatgacctcgtcctgggttatttcctgagcttttcctgaagccaccctgaagcttaagtttcagcttttgatctaaaaataattctggcaatttaagaaaaggaaaacattttttttttctaatcagaatgggggaataaaaccacaaaggaatcagctaactgtccctgttggcccagcatctcaaggattgtgttgcagcagctatcctgaggtgtgcccttccacatctgggcaagcaaacgtctctttattggttggtggttatgttaagcatgttgaacttggaaccagaagatctaccaattctggacacagctccttccctaagtagtctatgaccttgggatagtcacataagacctttggatgccagtttcataaaccagagttttcaataactaatgcctcacatttaatgaggtccatatggtaccaaacactgtacgaagtgtattggttgatcctctgacaaccaagtagtagtaggtaccgtctctactcatttcccatgtagtagatgagaaagctgaggcttaaagaggccaagtcactcacttatgcacacagagctgataagttgccatcctggaccctgccgtgagctggtgtggccatacagcccacatgtgtggatttagtttgcaagtttaatttgcccgcatagcgcatttaaaagttctttgaatttgttaccattaaaaaaaacaagaggtttcatatgaacatatggatttaccactactagtttaaaaatgtaaataataattatgagacttggtgacatgaggtctgcattctgacatggcattcgtttgctggaactggggctgctgtccctcctgggaggggcatgcactatcacgtttcctgaaatttttactgggtctgccttattattttatattagtcatgtgagccctggaagcttctgagtttgcaatccttcacctatatgatcccatctggggacgcatccagttcaaaataaacatccaaagtgaacagaagtaaaaagagattactttatgcttaaaactccctttgactccgtgctggctaagggataatgtccaaataccttagtataatacaaaaatattgttaagacctatccagtatcatttcagagaaagcctcacatcagctacactaaatgaccgattctctgaacacaccacgtcatttcatgcctccctgttttcagaaggctactctgtctgccttaatgccttcccccactttctctgctttcagactcctcctgcaaaacccagctcaaatatcactacttaagaactttacaatgttatctcatttaattctcacagcaaacccgtggggtgggaactgttactcccattttgtagatggggaaactgaggcttagggaaggtaagtggtatatagccaggtctcatagccagggagtggaaagctggggttcaaatccagggctgtagaataccaaagtccacactctccattgctccctcattgtgatatgactttaaaagagggtggaggagggagaaataagggtttggtggggaggaggctgtaggaaggaatggagagaaagagaagacccccactttgaatcacccgaattgcattcttttttcctttgttctttgtagctgtgacttgaagctccaccaatatccctatgtccccacgagccccaggaaagctggccccagcctgcagacctcattgattttgttgtccagcttcatcacttcccctggtttcattagtttcttttgaaaggcactccggacccgctgccagtcttccccttccctgtgagagaagcaggaatacatttagagcacactgaaaagaaaagaaggagatgcagaaatactccagctgcaacttcaggaaccataaaatcaaacaaacactgagaatcatgccaagaaatagccagagaatattagcatcagaatatttgggataaaatagtgatcatcttttgacaatagtttgacaataggatgaaaaagcacctttcctcctagtcaaagattgcaccaaaaagttgaagtccagataatttgggttcagggattttgaggtgtccttgcagggagtggggctgggaggcctggggacaattcctagcggtaaaagggggcatgtgaacaccccatcaccagcaactcagatctgtttgagggaagaatcttgtcttctttcaactcattggtgtgggcttcatatttacaaaatatctcagatttagaattttgccatcgcctccaaataataacatacagtcagagagtcactggagtaataaaaagccttttgcgatcgtgcacttgtaggcacctgccccatagcagaccatacagcctgtgaagcaccgtgaattaatagggtttttaattccagtcattatatcctggaaaatataacgattaggcattacagtttgggggtaaataaaggtgctaacttgttaaatgctaacaactaaaaagcagaagaatcacatcccatagtagcatttgtcgacctaaaacacaactttgatatccctccttattccacctttacaagtagaaataaggcatgtcccccaatcctctgcagaaaatgtcactgtaaaaagccaaagaggctaactcctcgcttttgagcttacaaggtgtttcagggagttttaagggataattttgtttgtataagatgtttgcctggtacgctgacttcagaacctcatcctgcccaagagtctgaacaccacagttggtacaaccctgttttggcgtttctttgatgggagggtgtggccctgccctgttgccagagagaacgcaggtgctgggtgcacagcacggcttttccgtggaccgactctaatctgtacaagagctcagggttgcgatggcacgggagaggggctttggtatccgccctacgtaagaagcttccaaccccagggaactctaactccgcctcttcacaatttccaggcgccgtcaggctcatcaggtctggccgcatgcccaggtccctcggattggactcacaggatcagcagcccgtagccttctttgcggtagtcgcgataggccttccacggtttgatctccagccgctgcgggtacgcgctctcggtgcggtacagcgcttccagcaggcatggcgagcccaggtgcaccgactcaaaggaacccaacttcatgcggaaaatcttgccatacttcttgtggtactccacctgcagccggccgggcacagcgcggtgtcagcgcgcatcctccgccgtgcccgaagcgctttccctcctcccgcctccttcctcctaggggaccggggaccctccctgcccagacgccgaagcgcaccatgcgcccgaggcgcgcatgtcggggagggtttggagcgccactgggagggcggaagagggaggagagagtcaggggcgcgaaaaggggtttaccagggtgtcgtgctgtttcttgagaccccctttccagagaatctgcagcaggctgcccagcagtggccagctggtggggcccggcagggcggccgcgttctgagtctcgccaccagctgtcagcgggcagactggcacctctcgcggctgaggggacgtgtacgccgtagatgtcaccagtctcgggggctgcctcggactgcgcagctgctgcaggaaggcggcaagcgagcggctcttgctgatgggggagctcatggcagcgggggacaccggagcgcgggaaggcaggaggatggggtggggcgaggttggtacgaggtgctagtgggagtcggggcttaacgattctgggaaaaggaagcaaagagggccagctggtgtgatggagcggggtgaggcgggacaggcagcagaaaggacctcggcgaggatgctcgacgctgcaccacgcgacagcctcagagcattggtgcctccttgcactggccgcaggggctggaagagggtggccggtgtctggggacctcttgaaaagggaaagctgggagtcctcctgttggtccgcaaggctgacctctagggtctggctggagccacggggaggtgtcaaggagggtagatgagatgctgctggcgctgcgtttcctcctgtccctctccatgttcctatgcccagggaccatgcatttatggagacagagcatgccctgggtggccaatgagcacgcagaggagggcggagtggcccccggctggccagactccgagggacgcgggacccaggggagggggggtggaaggaggatggagtcagcgaggtgagcgagggcgtccgggcctggggtgaccggggctatgttcgctgggcgcgggaggtggggtgggggcggcagactccaccccggagataacccccaggaagtcatgcgaagcccggagttcaccgggtgtgcttcgaacgcgcctccccgccctcccccggcgggcaggagccggcagcggcggccgtggttgccgcccggcgcttgcacaatcgcgatgccgggcgggcgaggtccccgagtgcgggcccagaaaagctgccggcgtctgccagggccccggggagcccgggcgcctcccggggagccagatacccccagcctggactgaagtgattttttttttttttttgcctttttttttttggaggaagtttggctttctgcgcctcccagggtggggaggatttgagtcttactgaaatgcaccagaagaggagactttcttaacttgagcaagaaggggagtttgtagaatttccttcctgctgtttcatgtttggttgttttgcagattaaatgaattaatgcacgtaaagcggcaacaacgaagccttgtctatagtcaacagtcaataaaagttagttgctgttgttacttctttaggaagttaggaaatgcgccttgagagcgtggcttgcaccaacgatgcttgaattcaggctgggccacctcccctatgtccactgcccgcctctgttcttctacaccgactaccttgtgcaaaggaggggcacacagagcttgaaaccaccgcccccagtactccccctctcccccaaggtgcgtcctaggcaggtccagtgacaaacatacacaatttctagagttaccgcggctggcaagagtagaactcgctttgctaattcaggaacggaagttggagatttttgttgattgttttaaagtggctcgaatcctttcaacctgatccaatacaaaactaccaccagccagggaggaggggagggacattctgtttcctcgccctgcttttcaattacgtgtctcagtcatttttgccccaagtgttggcaaatccttccctggtaaattcttttgtaagcctctagtttgtttcttaaaaatcttttgcagtccaacttaagctttaacaccatcatttctgatttgtctggaggggctaatgactgtttatgttaataaaaataatagctattgatatatactaaactttatgaatcttgtacatatttatatatacattgtatggtatatatgttacagcatacactatagattatgttatatgcaatacacactaaatatacataatatagtatagattgcatacagtatgtagattccatatgttatataatattctcatgaaagctttctagggcttatgataagtcaggcactgagctagacattttacatcattttttccgtttagttctcatctcagcccaatgtcaataaaatgaaataaaataaaaaacaaaaaaaaatcaaagacaaacaaaaaaacccttgactcttacagagctaagtaatttgcccaatgtcacagacgttaccattggctcaggtgggattcagacccaatattttctgattctaggctgggccctaaatagtacacccatatacatcatgctatgttatgtcactttttcttaaaccagagtgtctcagaatattggaagtatttcttaaatgagaattatcaccaagaggaaagtgggggggatcagaatgcctaccatgtcagtatgtgtggggcagtgtgaggcaaacgttttatgtgctgacggtggtgaaaaagaatagctctggctgagtgtagtggctcacgcctgtaatcccagcactttgggaggccgaggtgggcggatcacctgaggttgggagttcgagaccagcctggccaacatggtgaaagcccatctctaccaaaaatacaaaaattagccgggtgtggtggtgcatgcctgtaatcccagctactcaggaggctgaggcaggagaatcgcttgaactcgggaggcggaggttacagtgagccgagatcgccccactgcactccagcctgggcgacagagtaagactctgtcaaaaaaaaaaaaaaaaaaatagctctaaacagaaggtctatgtttttcactactgagtaccttgattctggtgaggtgcttggacacagtgaatggtctattgttatttcaactattgagtaattttcccaattattctttcttttccttctcttttggcagatatgcacaaggagaagaggaaataatttcagacttgctaggtttttctaagagtttcatgctatatagctttatatactctaaatagatatttaaatatatgggcaatcattagttacatgatagctaaaaagaaaattcctgtttcagggatattggtttctcatgttcagtggagaaaatccccagtaatttttagaccggattgcagaggaaagcaagactagttctttgaaacttcattgaccccaatacatacctgtccttgagaagtatgattaaattcaaaatgactatttttgatcccgcttccaggaattcactattcctcatctgtcctcatccttcactcactacttagcctctatgagtcatccggatagggatcttgtcaggaattactaatgagagatcttgaaatgcctcataaatgcctgccatcattactgagacaggctcaggccctctgttttgctctgggaaatcttaccaagtcctggaatggataattagacttcagccctcataccaagggaccacccatgacaacatgtgtgtgtgagttcacacacctgtgtacacatgtataatgagggtggggtggaggagcctgtaggagttcaagggctggtttctctgcactggaaaatacaaaacactttcaagtatatgcaatagtaatatagttttgtgcttaaaactgcttaggcctggcatgatggctcacgcctgtaattccagcaatttggaagggtgaggcaggcagatcacttgaggtcaggagttcaagaccagcctggccaacatggtgaaaccctatctctactaaaaaatacaaaaattagccagatgttgtggcagatgcctgtaatcccagctacacgggaggctaaggcaggaggattgcttgaacccgggaggtgaaggttgcagtgagctgagatcatgccactgcactccatcctgggcgacagagcaagactccatctcaaaaaaacaaacacaacaaactttgcctaaactggggcgtgagtactagatccactttccgttgcggaaacctggaggacttacttgccgcatttgttaaatggacagtgttggttccaacctcacggtaaagttcaagcttcatggaaacaggagtagtaacaatagccaatttcacggggctcctgtgagaacactgcaaataaaattcctaccacagtaaagtgcccagcaaatatgaccttgtagcattactgtattgcatgccttggttttttcaaagtccatagaagggaggcaatttagatgtctctgactcaagaaactgtatacttgaataaagccaaaggaagattagcaatgaaatgctggtgaattcaaatcccagctcagccactgagcagctagaaaaaccagggacaatttacttgtctctctctcagccttagtttcctcttctcaaaagtggcgatcaggacgggtgcagtggctcacacctgtaatcccagcactttgggaggccaaggcaggcggatcacctgaggtcagagttcgagaccaacctggccaacatggcaaactcctgtctctactaaaaatacaaaaattagctgggcatggtggtgggtgcctgtaattccagctgcttggtaggctgaagcaggagaatcacttgaacctgggaggtcgaggttgcagtgagccgagatagcgccactgcactctagtctgggcgacagagtgagactccatctcaaaaaaaaaaaaaaaatggtgatcatggtagtagttcccactccatagggtttttctgaggatgacaaagcactgaaagtccctagcacatgtgctcactgttaatgtcattaagaactacaggaactgggctgtcaaataattaaggtcataatctttattacatgtgtcttggagttctttgcccaattagacaaaccttcttgaaattataggcattgtttttttgtctttgtttttgtttctcctaaagcagatgacacagtgctgtttatgttggccagcacccaataagcaaataatgggaaattgattattgattatttcctcattcccaagtgaaaaggagaaaggttagtatcaatgtattctttgttttctgaggaaatcgttgggaatcctggagggctttatgtgtgggtcatatagaaaatagttctgtatgacaaaaacgatagttttggtctcaaaagcttgggctgaaaccatggctccaccactcattagctgtgtgatcttgggcaagttatttaacttctctgagtctagtttccttaatggtaaaattggagtttactatacctgtgtctcaggaaggtcaagataaatactaaaaatattagacaaaacacgattgtcttcactaaaatctgtttggcctctgtacttgcttgataatttctgagtagaattcagtcatgttggtaaattaaagttatatcacaggtatggaaaaatggaccttaagtgctttaaaatgcagttccgggtggggcggggtggggggaacttttcaacagatttatcactgaaagagctgctttattgcaaaggagatgagaaatacagtatgcacactcaatcattccaccattactacaaattataacttattaaggaactactatgtgtgtggcagacattgtattgtctccacccacacaatagcgctgtaaggtaggttttgttattttccattttataatgacaaaacctcactttcttacagagtttaagccagacctgggttgaatctgccctgttacatattaccattgtttccttgtcctcatctataaaatagaaatcataacagtgtctctcacatattattatagtattataattataataatattatatagttactgccctgtaacttaaagtctagcttgcttcaagatgccagcttcctgaggacaggaagactgtctgtcttaccctctgctgtattcctagcacctatagctatgcccagatcagtttaggtatacccaagaaatgtttgtcaaataatactattgcaaaaataacagcgattaagtgccttacttgttgtaactgtacttgttcaattgagtctatctttctgttaaacttagctcctggtaaaaaggtgtgtctagttgcaaatcttatatataaagaaacattttcttttgtttttttcctattttcaaaatatctagtaaaatagagatctgtgtgagacagatgtgcactctttaacaggttatctccacatgaaaacagagaatttattaaatgaattaatatgtgtaaaatatttgggaagatatagatgtagtataactactgatttaagagtcaagtgaagccagctaatgaaaaaatccattgatttttttaaatgttccaatggtgccatacatgtttcataattcagttttaaaattacatcatcacatagatacctattttatcctttcttgcatgatatgacttggctaataccatcagagtgaaaattggggaaattccatgacaggattattattgttgattaatttggacccaaagtatagtttgctctgctcctatatgtcaaaatcctgcctccacataccatcttattggtgttgacttggacagcattctgcagcatgattgagcttaggatgcatttttgccagagctttaatatgaaccaacaagcatacaccttgataggaaattggcacctaaaggcacctggtggaaagtacctctgtggttagatgagtaaactccagcagtgaatagggatatccggttttttgtttatgaacataaagtggcaaacaaaacaattacaagccaagaaaagtctggaagtgtcctttcatctttgagaaaaaaaaaatcagttagcagagtacttacgcagtctttgtgcagtagcaattgccaaacacccctcacaatccagattttattacttgatttttcaccaacagagaacagcgatgtaacctccttctgatttttgtgccatatgaaacagtggtgtttacagtattgaggaggaagtttctcagagttcagtcctattgcagcttgcatggaataatttgggatcttacttgtttatgtgaatattcacagattcctttagaataatgggactttccattgaaaaaaatgtaatgtgaatttccagtgatttattgatttgttttatactctgtccagttagaattctttggaagtggaatcagtccagagacggttattgagcatctactatgtgccaggcaccattcctagcactagggatacagtgatgggcaaagcagaccaggcacctagctttttggagctcaaattctactggggaagacagatcacacacatgtaaacaaagaaatagtataatttcagataggcataaaactaacatttgagctcagacttaaattgcgggaaatggtcagcttcactaacgcctggaggaaaagaggcagggggcctctctcagcatcttgagctcaaggtgtaaagagaaccacgaagagaatagcacacaggatgctgatcagatgcataaatatatttaatatttattctaaagacaaagaggtcatattccctactcccatctctaaatctaattatcaaatggctcctggttggcatgctttcatattgcagaggtgttttattttttcaagatcattttgtttagtggcacaggtgtgaaagttaagagtctaaatagacatgaagctcttaaaataagaaataaactgaataacgtcattaggattaccttctttatttccaccagttcacaggtgcaacaaggttctatgggctaagcataagaagaatgtaaatgttggtcaatttctcaaacactgcagattacatttagaagttatttgaaggccatttgatcagccaaacacagcacagacacccttgagcacctgcaaggttagaagcacatggctagcctctgttcttgtccctgaggaatctacttgctctcaaatcatgtgtttaaaatgaaacagagctggagtctgtgtgatgaacttccttgggttttacctgcccagcaaccaagatcttgtcttctgattgctgagtggttcacataggctaatctcaccctacaaggcaaagcccatgatttaggaccaatccacacattccttcctcttggctaaagttgagtgcatccacctgggatgaactcatgttccaggttagtcagatcagagtgaatgtggagacttttgctggagcaactaggaaacagaagactctttcccctgggaaggttacttgaggcccttgatttgctggggccaccaagtagagaaggctggcctcacggcaaagccagcacaaaggagagcaaaactaaaagaggagatggaggacagggaagagaagggaatgtcagatcctcatgccatcgttcagggccattcatccatctctggatttcctgtacatgagccaacaaattcctcatgttgcttattccactttgatctgagtttctcctcttgcgatttgaagaatactgactgatatagtcattctaacctatatattgctatttggattttatttatttttaatgataagaaacatcatccgggactaggaaagggtataatctttctggcctcaagcaatttaatggagcataattatgcatggacctagctagagatcccagtcctgaaatcaacagtattttatttctttatttttgttcattttacatagatgttctatccagtatgcttttcaaaaatatatttaattgttggtttggaggcataatgtggtggctacacacgtgggctccagattaggttgccaccttcattttttcacttttcagctgtgtgagcctctctgaagattcttttttaaattgggggaagcaatatttacctcgtagcgttattgtaaggattaagtaggataatataagtcagttacttagcacagtgctggcagagggtaggctcttatttaaattagctcttattattattcaattgataatatatggcccatctgatgtcacgtgctttaatctggtattatttgtgtttatcacatatgcttccttcacaaatcaaccacaagctatctgttactttgtctttccctttaggtatctctattggagatgaacgcatgttcaatacacgtggcctgcctgagtcattagcaaagtgtccaacaactctgaggtactgaaaaatgaaatgactagttaatgtagattgagagtccacatgccagtcacatctcgtctcacttaaatctcccaccaaacttctaaaaaagatgcagccgagatcatgaaactcaggaggacaccaagtcacacagcactcagttgtgatttgaacccccggggatccctgactcctgagccatcacccttgttcacattgagactgcctgtatccctgcctttccacaaagaatattcataacttgtagggcttaaaatgcgcgcccatgacttggatatgaaaaagaataactattttctatgactggcttcatctggctgtgtaacccctattcctgttgtgccacccttgggtaaataccttggagtagaatagctggctcctcttgtggttgggtgtttagctgtttaagaaactcttgagctgtttcccaatgtgattgtaccttttcacattcctaccagcagcataggaaagttctgatccctctacatcctccccaacactccttgtgatcttctaaattttagccattctattaggtgcagagttctatttattgagtcagtttttatgttgtgatttttcaggaaatctgtccatttttttctaagacattgaatcattgacatataattgcttatcatatgtctttattatctttttaatgtctgttaaagctgtaattatatcccctctgttattcctgatattgtttttgtttgtatgtgtttctcttttctttttttctttcattagtcttaccttgggtttatctattatagtcatcttttcaaagatccgactttatgaaatttctctttgtttactatttcatagatttttgctatgatatttattacttcacttgttcattctgttttgctcttaagctcccaatatctggacactgttatggatatcttatcttgtatggttattgatttccaatttaattccagtgtaactggagaacatactcttaaagcttttaatcttttaaaatatattgagacttattttttcgatccagcacttagtttatctgggggaatatgccactgagcactgaaaatgaaaatgtattttgcagttgttgagtgtagtgttctacaattatcaactgggttgttttccatttattccttctgttgttgttggtactactgctgttagaatattgctctattcttgcctttttggagggggttaatcaaatctttaagcattccattttatttatttgattgtcttctttgctataactcttatttgtttatttttggttgtctagggcaaataatttgcattcagaatgtatcaaagtccatttagagtcaaaagatgtcatggccttcaacagtacaattctagttatgcatcccatttttttgtgtgttcttgttattatatcctttacttctacttacgttatagattccagcttacaatgctgtgaattttgctttagtccttttaagaaaattacaggaattacaggaagcataactttttatgtttagccatttattgaacctttctggtgctgctccctcccactgaagatccacttgatctttctttcagccagaagaacatctgttagcctttctgggactctcgtctgctttttcacttaatccagcagtttgggaacagcatcaggcctcttgttttgtttccagttgcatcctcttaacagcacgctctaagggtgctttatccaatattgtaaaaggaaactaaagcaagatttgttttgaggattgcttggtgcccctttaaaaaaattagacaccaacccaggaaaagagttggaaaaaagtaccccaaaattttcccatttacctaggctgtctttaagaccaatatcagtcaccagcaattaccttttgttcccagacaggaaaattgaatgactgcatcaacgctaaaaagcttggattgaatcagacactttcctcagaagtgaaaaatgcctgaccacaagccctagttaatttaaggccacttagatggcgactccaggagaattccaactcagtgccccaagatttctcagggacttggatttctccctaacctactggaaaagaatttgtcatcagcaaagctcttccgtagagaaacttgagataaaatgggtctttcaacagggctgtgattgtgtgaagggatataaactggcaagaattgtgctcctcattcttgatggaaggttaacatgattaggatctccagaagtctcatatagcaagattaaattctattttgcatactgaagtctcagatactcaaatttccactagcatgttagattctcagtgtgctccctttatgtgggaaatctgtaacaaccacaaggcacactcaatccttcctcaggcataggcacacccagacccacccacatgcgcacacacccatacgtccacacgtgcacccaggcacccgtgctgcatgccctcacatgcacagccccacatgcaagcacacctccatgcaactttcctcaccaacacgaacatgcacccacattacacacccatatctattcccccacatgcacctcttcccacagacacatcttccacacatgcatgccccccgcacttgtgatttaatggcacatatgattcagaatgtctgtgaagccatttccaacctgtttttgtaataacctgtgcttctcagtccaaaagatagtggaacgtatgtttccaggaaaatatgaaacaggaatttctcaatctcctagcagcatccccaccctgctgtactaatattagtccatgttgccaatagcagcagcccatgtcagactggctgcctctcctccccacctaatccccacttttcttgtttgtaattgaagaacaaccgactgtatctcatgctcgggctgaccaatgagtaagcaaaagtgttatgcggggagacagccttctaattctgcagacattattaaaataatccaacacaggtacccgtgcaatcaattttcagtttctaggatgagagatatgtcaccttgccttcaaaaggccaaacctggctcgcttcattggctcccttctcaatgtctgatacaggacccaaaaaggtctatgcatcctgtggcaagaaggtggcatcctcacaatctgggacctgactctggtgaaaagtgttgtttagggaacagatgcttgatctttttactttcgctgctcgccaccctttaagaggaaaatcttccccaaatctctcttcaaatcaaatgccggatgtcaatggttctaaactaaagctgagcccctagaatcacctgggcagtgttttgttttattaatgctgatttctagcccctacctgagacctactccatgagactgtctggagtctctatgagccagaatttggttaaagttacctgggaaatcgaggggaagccaggtttgggaatcactggccaatatggtgatgcctgtctagagcctggacttcacaacccagtgatgtcaaccacacttattccacccatcgtgcctcgagatgtgggtccacgtgcagggggggcctctgtgcatggtggtcagagagctcgccatccctctttgtgtgctcttacccagctctccaggcagtcaagggctaaagggagaggtaggtgggagctcccttgagcagaggggcctttgtagggtgatggaggctcaagagggaatttcctgccctgttctggagcttgggcccccagtcctgcctgaagtcccagggtccacagtggcacagatagagacagctttccggaccttggagaagaatctcagtaataaccgggggcagggcggggtgctaattaccaaaggacactcactccctacagagttctcctcccgaacacaacttgatggaaggtaaacacccacacaggacatttaaataatgcccaagccggaatgcgttgataaccagtggcgtggacattcggcagctttccatttccagaacatactcgactgtggagaaaagacgatggtagctacctgagggccttagcatttgagccctggtaggtgagggaatctgtcagagtgaataataaactcagtactcccaaagaccacagcctcccttaatggtgtactccataaaccctcctgatttttttgcaagaattccacttgctctctagttctgctacttacattttccataggtagtggttaagaccagaatgagagaaacctgcttttaaggtatgagactgggcaagtgagcccatctttcttagacacaattttggcttctgtgaaatggctgtacttacttcatagaattgcttcaggaattaaataagatcatgaatataaagcatgaatatacagcatcaataaatattggcacataaatatcagtaaattactaatggtaaattactaaaaattaaattaactgaagccagagaaaagggaattccttagtttcataagaaatgtttatggtagatgttttgagaaggttaatttgtggtggaaattttggccaggtggcatttttatatgtataattttataccataattatatgtatatgtctttagaaccctccatcatgagagaagaagagaagattacttttgtgtgtgtgtgtgtgtgtgtgtgtgtgtgtgacagagtctcactctgttgccgaggctggagtgcagtggtgcaatctcggctcactgcagcctctgcctcccgggttcaagtgattctcgtgcctcagcctcccgagtagctgggattacaggcgtgcgccacaaagcctagctaatttttatatttttagtagagacagggtttcactatgttggccaggctgttcttgaactccttgcctcatgcagtcctcccgcctcggcttcccaaagtgctgggattacaggcgtgagccaccgcgcccagcctaaaagattactgaagggaatatttatataatatcttgaaaagcatgcacctagaagcaacttccaagggtcacagccacctggttagctttagagaaaaaagtgcctaaggtgttacattttcaaggatgtttgaagaatgtgagtggaattttctatgcagtttcacagggagagcaattatttgggtgtccttcagaattcaacactacatctctctcagtccatcctaatttaaggcactttccctgctgcataacttcattcatgttagttctgcttctagtggaaatggggaattcatatataatagtatttctaatgtttaggtttaattttttaaagttgtgaatttccaagctctcaccatctccttagatcttcacaagtcatgacatatataccaggttgaccaccattttacaaataagaaaattctgagagcagagaatttaaatcctgtctttattcagctcttaccataatcccccattttccatcttgagtatagtgtctttccatacctttgttgattattgagttttccttacatttagatgacaaatacgactccaaaatacacatttatcttgagtccttcgctgaccaacatttgaacctacagtatttagagaaatcctaaaacagacatttgcactaattccagaagctgaaggggctcaaaactccgggctctcagctctccagtggctagagatcatgtgactaacctcagccaatcccatgctctgtctggaggtgttcagtgtgcaaagaaacattgcagacttcagatacatttggtggcagcagccacagaattcagcgtccaatgccagcagtctgttattgcttgtaatagtgtccatgaatatgaatcaaaccagactttccctttggtataattttggccacagtttggctgcctaatttccctagatgcctgcttatttattcaggcctggttgtccagccttcttatcaattctacggactccccaatatccatcaacaaattccattgctgcataaccacgaaagacatctgttcttcataaacaagaaatgcggccatcgcaaccacatgataaataaaagaggcggtattcttcccagatgtttcagggcatcttctcttaaaccttcagagggtcctgagctgctcatttccgggacttgctgagccctgacagtaaacagacttttaacaaagactcgctaaatgttcagattttttttttttaaattaataagagaatggtccattttcttttcaaatcttaacacagagctggcaggatgtcccccatagagttcagagtcagaagttgtttttgatgcgccgacattccgtttgtgatagtcttgcctctatccggcacttcttaggcctcatctccttggcctggtttgtgcagtggttaaaaggggttgatttaatccagaccacctgagtttaaatctaactttccagctttctggctacacaaccttgggcaaattgctcagtatctctgtgtctgtttcttcatctataaaatatatagattttgataatacctacatcctaaggctatgaaaatggttaaatgagttaattcatataaagcatgtagaacagtgcctggctggtagtaaatacactgtaaatgtcgtctattaacatattatcctcacctctgatgcatacttgctcacttaccttttcttttctcaaaaccacctctcataaaataatctgaaattccttattgatctcattcaaaatctgtttctctcacaggcgtatcctcaaatgaagccttgtctctgtgaaattcctggtaagagaagttgaggcatcaatagtggatcaggaggtatttttaggggaagaggagtctcagtattcatggaactcaatgagacctccacctacacaaggccaaggctgcatatggatgtagagaaataaaactcagatgttgaaaagtatctgaagagatgatagcaaagggaaattatcttttatctttcagataaatcgtcattttatggaatgccacaggaagaagttttctttacaagttctgaagacttgtgatgaatgagtccatagtttcacctttgaaaatgtccctgggagtgtcaaccccatcacttttacttatattacactcataatcagttcatctcgccaagaaaaataatattatcctcatgcccaaacttgtgacttgatttgaaaaccagtaaatcagaaataaaacttcccatgtgtttttttcctacatgaatccaagtgactcagatattgtgttattcaataagactattaccatgactcaggtaaaagggccgtttatattttctgaagtctcaagtctagggtccaaaataaaactagcatcttttatagaataatttttctctaaaatgaaatgtgtatgtcacctggttgtcaaaatccttatttaaatctttaaggagaaaagcaatggtttggagagtggacttaagcaattgaatcttggattcaaatcatagctccagattgtatcagcctctataactaagagcaggtggcattacctttcccagtcttggctttcttattggtgaaagaaaaaaaagagaatattaccagtcttgaaatgttgttgcgtgtattcctacttagcagggtgcctggcacatatatgcaggtaatataaggctctgcttcgcttctggccaaaacttcctggcacaggaggacatggttctcagatgtgagaacatgttctgtcttctgcaggaaaccagaaggggttctcccttctttgattgcaggaggaaagaattctaatggaatccatatgttctttggccccatttaaaactccacactctggaaaagtagatggtgtcctggagtgaatcccaaagtcaggcccactggaaagggtcactgggctttctcctgcttcagtggcctgggattttaaaagttggaaaagtttatccatacaactttattggaaatgattgttttttattctattcttgcccttttatggtataaagtctttgcttttatgttgttaattttagatttaggcttctttgatttcattcacttccttaacaaagtaaaaagttggcaactctttgaagttgctgcaaccatattcccaactacagcatccttctatgagcctctgctctcttaatgggtatagcccaagggctagaaatagaccaattcttggccaggcgcggtggctcacgcctgtaatcccagcattttgggaggccaaggtgggtagatcacgaggtcaggcgttggacaccagcctgaccaacatagtgaaaccccgtctctactaaaaatacaaaaattagctgggcgtggtggcacatgcctgtaatcccagctacctgggaggctgaggcaggagaattgcttcaacctggaaggtggaggttgcagtgagctgagactgcgccactgcactccagctccggcaacagtgcgagactctgtctcagaaaaaaaaaaatagaccaattctttttctctaatcaggtaaaatgaacaaggatattttattttaattttttaaagacaaagtcttgctctgttgcccaggctgcagtgcagtggcatgatcatagctcactgcagcctcgaacacctgagttcaagcaattctcctgcctcagccaacggagtagctgggactataggggcgtgccaccatgcttgctaattttaaaaatatatgtatttttggtagagatggtgtttccctatgttgccgatgttggtcttgaactcttggcctaagcaatccctcccaccttggcctcccaaagcgctgagattccagacgtgagccaccatgtttggccccaggaaatttataactaggacaataaatgaaggcacaagagaccaatcccagttgttctatcctctactattctgtcaaccaactttcaagaaactaacattcgtgacatttataagatggtggcctctgctgcatgccaatcttgtgaagtacacacaggggcatgccaggtataagacagtaattacagtctccaacacagaacttcccggaatggaatcacggctcaaagaatcccacaaggaaagacaagcaagtgagcgtgaaaagccagatgtgaaaggcagcagaaatgcttcacgtgaagtaagtaacttatggaagctctagaaaagcaggaagggattaaacatgcattgattacgatatgctaaatgggctgggcgtggtggctcacgcctgtaatcccagcactttgggaggccaaggcgggcaggtcacgaggtcaggagatcgagaccatcctggctaacacagtgaaaccccatctctactgaaaatacaaaaaatcagccttttactcctaagcactgatttgggatttgagaaaaattttacaaaaaatcagacttttactcctaagcactgatttgggatttgagaaaaatccagctcatccgtctgatctggcctcttgatctcagaagctaggggagaccatttttgctccacacataactaaagccaatagaggaaggtggtttgcagaggtaaagaggattgaagcagttgagcagacagcacagaggagaaatgaggcaaaggtctgatgtcctaatggtttccatctgcaatctcttccaaaggcactttctgatcaagtagcaatttggactttttttagttgtaagcaacagaaactggcccggctatcctcatccataaagattgtattgcattcaaaggcttgcaaaagtgtggctagatgatcaagcttggggtgtggggaggattccaaaacggaaacccaccactgatgcatggccagaaccccccaccagaggatcctgctgtgaagaattaagagccgtggatccatcgacgccaggtcatctacccaccctctggctgctggcagtgggaagagcgagttggtgcccttccacttctgtagttgatactggggtcctgattgctaccggggtgctctggttatatatcacactccagacttggtggtgtgaaacaataacagtcttttattattatcatacctcatcatgctgggagatgactctcatctcctcactgaggtttcctgtgcagttgcagagagttggtgaccggggctagattcaccttaagtcttcctcactcaagtctggcagttgatactggctgagagctggggtctcagcagggaccattgattggaacactgctgggtgcctggacttccttgcagcacaaaaggtgggcaccaagggttaatgcccccagagagaacaaggtaaaactagattacctcttctagcccaaccttggaagtcatatggcaacttctgcttctgctgcacttttttggttagaggggactcaccagataagtccatattcaaaggaagggaagtaggcttttgatgggaggatatcaaagaatttgcagaaatgttttaaaagtacaattgcctcaacacgaaggaatctacttgatttcctaaaactagaatcctggttgctaaaggttccataagacaccccatatattgcttagcaaatcaccattcattgtttaaagtagttcaaattagtttcaatttcttgcaggcaaagacacccaacggaagcattggattccaagacattgaattccttgaaaggagagatttaaaagtacctagaatacaaccttccatatgacatttattaaaattggacaactatactttgagaaaatgattgatatgaattacagtgtgattgacctatggtctcagatccaaaccgtaaaccctacacattcccacggctaatcgttttaggaatagaccaatccccagatagtaagtgaagactcaatggattttggaagtcagtttggcacaaagaccctggaacagcttccggggctagaggtggagtttcctgttgctgaggtggaagatcacgagacaatcaagaaacatgcctcttccatggcttgaggtcaagtctaagcttgctcagtatctgttactctctgattgaacttccctttaattctcccatcagccaagctttgtctctgaggtcttataggaagtttttggcaaagtggcagaggtggtgaaggacatcatgaaaaacctggagccaatgaagcagaaagacttattctggaatacatggtgtggcatcctagaaaactctagatatgacaggtaaaaacctgtggagggaagagcgcgttaacattcaacattgaagtaagttaacctcaacgaatggttgtttggttgacaaaaaatagacccaaacagagtgatattcagccagtatcattcaaatacctgtgggttatctgaacaacattcttgctttcaatttcttaatgctcaaattgcttagacattttttctttcccaaacaggtgggtaaatctaacttttttggtgtctctcttggacatcccagttaatgctgatagttaaatttatactagacaatcccataggaagctgcccctcagagatccgcctgcttcctggagacacttctgacattcttcaaaattgccagataacatttgaatagctctgcgttagaatagccaataacccctgcattagaatagccaatgtaatcactgattcttcagctgcactccagagccttagggaataagttgcatgaaaaattttatgtgtatataatatataattatatatatatcatctacatatatttatataatatataattattattttatctacatatatttatataatataaatatataaacattagtttatatagttatagagaacagagggcatagcatgggtgagtgcccccagagagaataaggatggaacaaatatataataaatatctatatttatatatataaacaaatggaacaaatatatataaatattatatgtgtatatgtatatataataaatatatattttagatatttatgtatacattacatatataaatatatatatacatatagtgaatcaaactcgctatagcgagtgctcatgctgtgaaagatatctgggaaagagactgatggagggaaccgtatacaccccaggctagactctaagctttttgagtgtgggtgtcatatctgttttgtttgccagtgtatgcccagaacctagcacagtaagtgacacctagatgacaggacggactttgcaggcatgcagcccgtgtggtcacacagggtcctgcactcagaagatccctgcacatgactcagtgctctactgttgccatcctgaaattgttaatagtgtttgaacaagaggccttgggttttcgttctgcactgggcctcacagtctgtggttgctcctgatgacattcaataactatgtgttgcatgaatgagtcagaggccaaggccaggattatgttcctaccctacccttaaactctgggtcaaggtgagagtgttcctttaccggaatcgaaggttcgtctctcttgctctcatttgctgttttcaggctgatttttccagcaatgagtaacagcaggggccatccgtttacttcaagggaaaactctcctccccatgtgcagctggtctgacccggttctgcagcaggacaatttgccaagactttgatgcagaaaattcccttaaggggacttatttggtcgtaagtatcgtgtgtgaaagacatcaatatttaagtcctggttgggcttcatcagattcaaccctgttcttgtccagttttatcaaaatgtataaagtctaatcttagggaacaaatgtgcagtgatgctaatgaattttaatagcattggacgtctttgatgccttgtcttatgtcctcctgacctatcttgttgctctggcattaagttgacaaacagctgtggccaggtgaacctgacctcagtagtacctcatgtcctggggcttttctactggccacaggcagcacctgcagccatctagcgcaagaccaaacctgaaagtgcaggagaggtaacacctaccggggcaacccttggctgaatggggctgggtggataaatgctgtctctgtagtgaggacagttctgagggacaggtgctggagaccagagggtttgcaggaggagcaagctccagcggcccacagggtcatcagcccagtggcagcccttggaacagcttcctatcttcacctttttcacgtttcctccagcttccccagatcccttcccaccatgaactccctgcagcaagccctcgtctcaggctctgtccagacgttaatgtagccgtgacgcatcagtgagcactcttttgattttaagtgacagataactaaaccaaactttcctaagcaaatgaattcaatgactcaagtcattgaaaagttcaaggggacagctagctgagctctcagtgtgactaggggaatgctttctatcaggccctgttttatctctccctgttcctcagtttcacttctgtgttggttccgtttttaaatgagttcgctcctgatatggcaagataccagccactatgccagaactgccatttctacagcttcacagcaaataggaagagagggcttctggctcccattggaatcagaagttgaggctctgattggcctcagtttggttctgtgcttattcctgaacagtcatgtgaccatgagttgctgaatggctgacggctgttctcaggctccaccactaaggtggtatgacagtccacccagatcacatggactgatagggaggaaggggagggtcctcacattgaaatcagggctattgccagaagagcacgaaatgggtgtcgggaggcaagcaccacatgttcaggagaactaattcttcttgggcagccaatcaaatgtggagtctgataaatacaattttgcttcccattccccatcagcaaagagattattacaaaataaagtctgtaatgatgagttacagttggatataaacctattaaaataatgcattatatagattaattccctatgtatgcattattcaagtgcttttaatacagttccccccctttggggagtgggatcttaaaataaaaaggagaaaagttttcattgctatgttgtcctatatatcttgtcaaattatgcaaaaaatacatgtagacttgtttcacaaacataactagatagcataattacttgggtggtactaaaatttgtttgaacaaagttagttctaaaggaagtgaggcaggattctttttgagaagtataatatttaatttttatgggtatgggaaaatacagtgtagatgagaataactacgatttgtatccttattttatcagataacagttatataaggtatagaaacttagaggcattacccaattgtcctgagcctcctttcaccacctacaaaatgaaaattatacctatagtttgaactgaattaatttgcaaaattaatttaagaacccaaagtatatattaaatgcttaagagaaatacagcctctttttaaggccattgacaatttagggactgcccctcctcctcatgtcttcgcagacagcttttccggagcttagcaagtggtagctcgcaaagtactgaaatcttctcctaggatccatgtcctacactgctacaagaatcactgattacattggcaattcaacatttattaggtcaaatggaatccatcgtagccaggacctcagctctccttcagtatgctcagataacacctgaccgaatatgggaagaggctcattgtgtaaacacaaacgtggaagtgccttttattaaaacaagattttacctgtagaaagatttgagcattcaatttgcctcgaggtagcatctttacctggaaatgaaatctcattctgttattggagccaatgtgtttatgtcaccattggatgcaggaacaacttaaaaaataatagtatacatatgttatgattaactctaaacttttgtttactttaaggataagctaaaaaaactcactattgtcaaaaatagcttctgtaatttgttcttttcacaagaagtaaaattcttgtgttattttttattctctgtaccttgcgaataactcataacttaggagttcccaagttatgttcattcctccattgcaatctctgtcccacccttccctttctttccatttccgttgcaatgtaatgtaaggttaagagcatggaatgcaagaggtgccagtttcaactctagctctactgtttctagctctgtgtcctcgagcacattatgtcccgtactcttgcctcagttataccatctgtgtgtaataatgataatactacctcctttatagggttggttaactaatggtctgttttataaaggtctaaaaacattgtatacgttgaagggcttttaaaaatgctgtacttttagccaggtaaaaattcggttaagaattcaaactagcaaaagatgattctactttggcccaaaggcagtggtttcctgggtttgtgtcatcttgctttgcagcgtgtagacaattcttcaggagttgcagagagaaaaataacatgccagattttggggtcacagtgccatctgctgaagaaaggagtgttgctcgaacaatgagtccacatgatcacaatttgcgtaagtactaggcctagccaaaaaacaaaacaaaacaaaacaaaaagaatgcaataagttatggactcttgtacattgtagtggagtgaattcctcaacagcttacgctgtattatatattactgtattaatctctaaatacattatcacttatttattcatgcattgatttattcattagttaacatttgttaagcacctactttcctgttggtgccgcaacaacagagatgaagaaaacaggcatgatctgtttcctttggtgctctcagtttaacagggacacagaattcaaaagggaatataccagggaggcgtagaaagctgctttagggggcagcggatgctgctcttgtctgggagatgggtgcgtttgaggaaagcttgtgtcttagtcagtctatgctgctacaactaaagtcctgagtctaggtaatttataaacaatagagatttattcctgacagttctggaggctggaaaatccaagatcaaggcacctgtaggtttaatggctggtgagaggtccagtctctccttctaagatgccaacttgttgctgtgtcctctgcagggcagaatgctatgtccttacatggtagaagaacagaagagaatgaaccttgatatggtttggctgtgtcctcacccaaaatctcatcttgaattgtaatccccataatctccatgtgtcaagggaaagaccaggtggagataattgaatcaagggggcggtttcgcctactctgttttcgtgatagtgagtgagttctcacgaggtctgatggttttgtgtttggtagttcttcctgcatttattcttgatcttgccgccctgttaagaaggtgccttgctttcccttcacctcccgccatgattgtaaggttcctgaggcctccccagccatgtggaactgcgagtcaattaaacctctttcctttctaaattacccagtgttgggcagttctttatagcagtgggagaatggaccaacacaaactcgttccctcaagcccttctataagagacccaatcccattcttgagggctctgtcctcagacttaaagacccccgcctcattgtaaaaccacattggccattaaatttcaactacgaactctggaggacacattcaaatcatagcagcttccttgatgggagtaacatagacgctgagtcttaaggataggcagacggtagaatgcagctggctgaacaataggagaaaggcatcataggcagcaggaaaagcaagtgcaaaggccctgaggcaggagggagcgtgtagcattcacagaatggaggcccaagagggtgaagcacagtgagtgaggggaaagatggtccaaaacaaggtcagggagggaggctaggccctggtaagaaatttaagtgcaatgggaaaacaatgaaacatttcaaacagcgttatggaaaaaccatttgcaaaattgtttagctaaatacaaactgacagtacttaacattacccagcacagtaagattcaaaagaagtgcaaaatattcggaaggtggatttgaatgatttaagtctggggaacactgtcatgttcctcgggtgccctctgcaggcgccaaaccaaattgctgcgtgatcctggggatttgctccttcttgcctctcactcctcatggccagcatggaagaggaatctgatcaaggtttcctttttaaatcttagaaccaggagcctggagcaggtgttgcaggttttggagggcacccaggtgcgtactgccaggaaatgatgtgataacctcattctcgctttgtgacaaaatctaaattaaactgggacatgtctggacaattttgtagcttacataccaattcaaacaggttttttttttctcttcattttccagtcaatatactgaccatttctgtccttatatcttcctcacggagtgttcctgatggtagtcacacagtcttttattataattttatgagttcttgttggagcgattaatagcatttatactaataaaactttctaacatactgtataatttacttatatgttttggttatgatctttttcctatcaatagaatgtaagctacatgaggacaaagagttttgtctgttttttcagtgttatgccctcaatgctgagcacctgcccttcttggtccaagcaacatcccactgattccacagtcctcagggaccactccagcaagattcaagctctttctcccctggactcgccccagggttgcagcttctggtgctgtgactttggtcatatgtttgccaaccataagcttcatgatgccaagcaccttgtctgctttatttttctgcttgcaatagcacctagcatggtagaaatttcaaacaaacacacgcataaatgctctcatttaggtatgttaaaacagaaggctgggagttacaagttcatatacctggagggcctcacaggtgagcacatggatgggcaggtgccctacatgtacctgtgtgcgctctgtgagtgggggggtctgccaggcccaggagagagcctgctggccgaatgtgccaggccaaagcagcaccagcagctgcccatcaggcagaaacacaggtgcaatgtcaccaggatgctgattgtaccagctcaagcaaaactaaaaatctcaaatattggttccactaaagaaaaataccatatgggtcaaagaaaacatagcctggatccagtcagtgggaggccagttttcaacctggcataagggaaagtctttccaaatggtcattgttgattctcctccctgacctgcaggatccacatgcttccacttgtaccccatgcttctccccggagagccagggacagtccccagctggagaaaggaccagaaacaaaggtcggaaatgctccacatcaggaaatgagaagatgctcagcagacttgaaagtccctgtaccatgcggacttgcagaacgagtttttctgctaggagagagattagctcaaaggatagcaaggtctggggagaggagagggacaagaatgatgagaaatagaatgagaaggaaaacctctaaagcaaggggaagataggggcatcagagggagctgagtcagcaccaagactgccaggagccgccactgtcctctgtccagattcaatgacactgccctgtgcccgcagactctctgcccagtgccttttctctctgcttttgtatggtctgtgtggggaactaatgcatggagaagcgtgcaccatctcatgataatgatggagcagccaaagcctcatagagcatccgattggagccatggcttctttgagcccagccaaagggatccagcccctacctccatatcacctgttagaggagacagtgccccctagcccttctgtctctggagcccctgtctcctggtgcaatttctcagctcagtgactagctaaccaggcacttggacattaaggaagcatggtgatgaataagtgggccctgcatgaggcaggcttctcagggtttcttggcagcacatgtattagcatttggaccaatctgattttattttattattgttatttacatttatgtatttatttttaatgttgtgggtacacagtaggcataaatatttatggggtacctgagatattttgatatgggcatacaatgtgtaataatcacatcaggggccgggtaccgtggctcacacctgtaatcccagcactttgggaggccaaggcagatggatcagctgaggttggagtttgagaccagcctgaccaacatggcaaaaccccgcctctactaaaaatacaaaattcactgggtgtggtggcgcaagcctgtaatctcaactactcgggaggctgaggcaggagaatcccttgaacccgggaggtggaggttgtggtgagccaagatcacgccattgcactccagcctgagcaacaagagcaaaactctgtctcaaaaaaaaaaaaaaaaatcacatcagggtaaatagtgcatccatcacctcaggcatttatcctttgtgttacaaacaactcggttacactcttttagttattttaaaatgtacaataaattattgttgactgtagtcaccctgttgtgctatcaaatattagatctcattcattctagatgactaatttttatacccattaaccattcccacttccccgtcccctagtacccttttcagcctctggtaaccatcctactctccatttccatgggttcagttgttttaaggcttttagctcccacaaatcagtgagaacacgcaacatctgtctttttgtgcctagcttatttcacctaacataatgtcttccagttttatccatgttatagcaaatgacaggctctcattctttcttttttttatggctgaatagtactccgttgtgtataggtgccacattttcttttgtattttcattttactttaagttctgggatacatgtgcagaacgtgcaggtttgttacataggtatatgtgccatggtggtttgctgcacccatcaaccttcatctaggttttaagccctgcatgcattaggtatttgttctaatgctatccctccccttgccccctacccctgacaggccctggtgtgtgatgttcccctctctgtgtccatgtgttctcattgttcaactcccacttacgagtgagaatgtgtggcattttgttttctgttcctgtgttactttgctgagaattatggcttccagtttaatccatgtccctgcaaaggacatgatctcattcttttttatggctgcatagtatttcatggtgtgtatgtgccacattttctttatccagtctatcattgatgggcatttgggttggttccaagtctttgctattgtaaattgtgctgcaataaacatatctgtgcatgtgtctttatagtagaatgatttataatcctttgagtatatacccagtaatgggattgctgggtcaaatggtatttctggttctagatccttcaggaatcaccacactttcttccataatggttgaactaatttacactcccaccaactctttatccattcgtctgttgatggacacttaggttgtttctgaatcttggctattgtgaatagcgctgcaataaacatgggaatgcagacatctcttcgatatactgatttccttattgggggttatatacctagcagtgcaattgctggattatgtggtagctctatttttagttttttgaggaagctctctactgttctttgcagtggttgtactaatttacattcccaccaacagcgtatgagggttcccttttctccacatcctctctggcatttgttattgtctgtcttttggaaaaagcaatttttagctgggatgagctgatatctcattggagtttggatttgcatttctctgatgttcagtgatgtcgagcaccttttcatatctccatttgccatttgtatgcctgctttagaagaatgtctattcagatcttttgcccatttttaaactggactattagtttttttcctattgagttgtttgtgctcctcatatactctggctgttaatcccttttttcttgccttatttcttaattaaatattaaactaaatatttagtttgcaaatattttctctcattctgtggtttgtccaatgtaattttaaagtcctaaaagaatttaattcactgactcttcagtatgttataacctgaacttcttggctgattttatgggcctcagtgttagacagcacctaaggatgtgtcatgttaaagcctcttggtttaacctgtctttgttctcacctgccattggccacctgctccaccccagcagctcccacagtgaccagctccacaccggccatggtgtgcagacttgcagggctgcctctccgtccagttggctcgtgcttacagcctcacaccttgttcctccacctgggggcttccctgtggaaggctgaggtgagaaaaattatgggagcctcaatgagcaacctggaagtgtctgggagtgaggtccccgtggggccagcctttgaatgggaggcaggaactggcaaataagagttctccccagctgaactctcctgtgttctggttaacacagcctcttacaggacagtccccagagagggagcaaccagtcgtgcttgataccaagcaaaggtcggcttggtgaggcctcctggtatgggctctgctgccttccctgacctgcttcattccgctttttcctcgctctggctgccctgggattgtactccttaatgaagaagcagtatctaggcctttgccttggggtctgctttaaagattccggctgggatggcttctaaccattgtcattcttctcccccaggatgctttccaatttctacacatctgaaatggatgctacagtctcaaaaggcagcactaatcatggccatgggggtagttagcagtaataccaagccaggggagttcttgaagaggagatttgaaagatcataacttgggcagtggaatttcagacgcaactgggctgaactgagaaagtaatcatagctaacatttcctgagagcttacaatgcattttatttgcacgtattatctcttctactctttgcaacaagcctattagagacacattattatttttgccatgaaagtaacttgtctaacatcaaaattagaaagtggtgcaggtatgatttgaacgcaggcagtctggctccagtaagccctttattgagtcttaaacactttactcatgcaagtcaggtgacaggagctgcaatgtccactatgagctgcccactcggggacacatctgactttatacatgacttgtggtgatgggtaaagcctggtgcttaggagagtggtctctggagccaggttcaccaagagttcgaacccaggctctggtacttcctggctgctggagccttggccaagtagctttgtcctcctgaaactctatttcctctcctgtaaaatgatcgataacaatattgtgtggtatggtgaggattaaaacatttagcaaggtgcaggccacatagtatgtaccctgtcagttttgtatgttactgttactattgcattagtccgttttcacattgctgataaagacatacccaagactgggtaatttataaagaaaaagagatttgatggactcacagttccacgtggctggggaggcctcaccatcatggtggaaggcaaaaggcgcatcttacgtggtggccgacaggagagaatgagacgagagaaaggggaaaccccttataaaaccatcggatctcatgagacttattcactaccatgagaacagaatagaggaaaccgcccccatgattcaattatctcccaccaggtccctcccacaacacatggaaattatgggagctaccattcaagaggagatttgggtgggaacacagccaaaccatatgaactctcattattattatacttcagcaaaaggcaaaggttaacgtaggtgagagtttaggtcccttctggtcctaagatctatgcacctgaggattgaagtgcttctctctctcaaagcccctatgctactttcggtccccaccatacaattacatttcctcaaaattcctgctccgctgttcctcagctttcaactcagccatttctcaataaagctttgaaaaagtcagaattctttctctctttctctctctccctcccccagtttggcctcaccaagttctaaaacatgcccagatctggcccctgccttgcaccccagcctcgctccatgctgctctgtcctttctaccatgtctcaccaggctctttccctctcagccctccacccctggggtccactttcgtctcctctccccatgctgaggcctcccattttctcttagcttagaggccagctccagagctggcccccacccctcccctctgtgctctgcctcagcacctcatttatctccttcatgcacttggtaccatttgtgacaattttgccctttatttctgtctccctctccaccatttgtttcttgcagtgcttttacattgagctctggaataaacagatatcactgatggagcatctcctatgtgccagacccggtgctaagatttaaccctggaaaaacatctttattcaacaaatacttttttgagcacatatgagctacacactggaaagtcccaatactaagggcctggagagcccagaataggcaggagaacaggcgatgcccgtggcgggctaggtggttcggtggggagggcacagggtgctataaggtctcattcccctcatttaaccaaagaggaaattgggactttgagaaaggaggaggcttgtcaggggcagttctcaagctgtggcccatgaacctcgggggtccctgagaccttttcagggatccatgagggcctccctttcccaactacatgatttgtatgaggctggggtttttcatacctacaactaggcaactaaacagtgtatttggagagactgaatgcagaagtagacatgagaatgtaaccttccattaagcctgatattaaagagatcagtgaaaatgtaaaatgatgacaatcttctcaatttatttttgtcttagaaaatatagttatttttaaagtgtgatttttattaccatggaatggagttttatattattttaaatgaattaataaatacattttaaaaattctgctttaatttctaatacagcaaatatcgataaataacccacataaacaaaagttctttggagtcctcagtaatttccaggagtataaagaggtcctaaggcaaaaaaaaaaaaaaaaattactaattgggagacacaagtgtcagaatatacagtaattgttcagtaatattgctgtaaattaattaataggattgcctagtcacaacagcaaaggcatggaatcaacccagatgcccatcagtggtggataggataaagaaaatgtggtccatatacaccatggaatactatgcagccataaaaaagaacaaaatcatgtcctttgcagcaacatggatgcagctggacatcattatcctaagtgaattaacacagaaacagaaaaccaaccactcatgttcccacttatgagtgacagctaaacactgggtactcgtggacataaaggtgggaacaataaatgctacggattccaaaaacggggaaggaggcaggggaaaggggttgaaaaattacctgtggggtactatgttcactacttgggcaacgggatcattagaaacccaaaccttagcaccatgcagtatatccatgtaataaaccggcacacataccccccgaatttaaattaaaaaaaaattacattaaaagataggagtacctcctttacaccacctgaattatcatggcacataaatctcacaccctatttgccaaggccattcgttcctagctgttttacaggtaggttagctttctcaatgcaagtctgtgggacggatggagaaaaattccccgagccctttgatcctgccccagctgggccccgccgcgctgagccttgggcgcgccccctgctgcccgcggccggagccgttcgccacacccccgtgtttatgtcggtccacgggggttgcctgtccctttaattggcatgtaccaagtccttccaggtcacatttcctccctacgtcccagccgtttggactcactggccaaaagtccaagaggacggaatgtggagacagtgttgtatttttgcggggagttctaggccgaccgggagcgagagaacgctcgggggcgaagcgcgccattgcggccctccccgccgcctgcggtagtccagtcccaagatggcggccaccatgaagaaggcggtgagtggggagctcggggctctggatgctcgggcggcgccggatctcggccgctggggcccgggcgcgggatgctgggggtgcgcagctccgaagcccggcgtgggacccgaggccgaggccgaggccctgagagcggtcccgcggcaaggcctgctcgcgcctggcgccctgagcgttttcctaggcacctggccagccgaggcggggcgccggggctggggccgggagcctcgaaggacgcaggtccgcctcccgcgatgccgagggtgcccccggggagtctgaggaacctgcagccccggcctcgcccctgaggtgtgggaagccgaaggtcccgttgagtgtggttggccttgactcgggcgttgcaccggcatgatcgcattagcctcactggttatgggtagctgctgctgggagcgtggttacgggtgaggaaactgaggcccagagatggggagtcacctgcccgaggttacgcagctcataacggggacagcaggttcctgcatccccagattagcaggccccagagaccctgtgtccaacctggagctgcccatttccacgcttgatgcccctgagtccttcaggctaaaaccagtatttattgagaatggaagatgtgccgggcccagcagccggccgtttatctgttatcctccccgcaactcagcaagtgcaatgggttcctctccactttgcaggtagagaaacttagacacagagcagttagaggccctaaagtgactcagctagtaagaagcagagctggagttcaaactcaggtttgtttttgtttttctcaaagcacgcctgtgtaaccactaagccggctaaacttccatgtggggtttttaatcccgtgagccttcccagatgtgtaaagatagtcagatagaagaaaaagaaaattggagagggggaaggagataacggctgataatttggggagctttacagtgtgctaggtacagctgtaagttgttttgcgtgtattgtttattttatgttctttgagggagatactgtttttatccttatttaacaatgagaaaacaggcgcggaggcaaagctagcatttaaacacaggcattctgactccggagtctgtgttttaaactgctatagggggtctttgatgagaatctcttggctggagggatttgcgttcattccacttttaagaccacattagaacttctttgctttgcccctatccagtaccacatagtctatgccatctgtgcctggtgtagggtgacccattgcccccttttatatgaaattgagggactgccaaaaatgggaaagccccagccaactcaggatgtgttgctcaccctactattctgccatccaaaaattcttactgtgtcccagagtagggtctagggccatggtgattcaaaaaagtatgaaactttgtgagattcacttcacctctagtttgttaaattgggccctctggtgttaggtatggcctttaattccttggaagatactagttgtggttcactccgttttataggtatggaaactgaagtgcagagaggtgaagtaaatggtagaagaggaaatggcagaagaatgatttgaaccttggattttgattgcaaaatttctaattaccaactttttttttcctttcattgattcagtaaattttcgggggcacgtaatatggcgtagtctcagttttaagtggagacaactgtggtgaccagtgagaaagctcttctccccttaatctcatagccccaaagaacgtatgttccagggcagagcaggcattactcagatagtcagacagaaaactagtttctctgatgagaactgtgaaggaaaagtgcttatgaaatgagggccaaaatgaggtctgttttgagatcagagaagactttcctgggaaagtgccatttaagttgagatctgtgagattatgtaaggaaaggaagggagagttggatagggagcgaagcattctagagaggagtatctgcagagactctgagtgcatttaatacaaggaaggcccgatggcagataatcaggggaagagagtttgagccatgatgggaaaagaacttatagaggggtaggtggtggccaaaatataaaggagcttctttaactttggaggctttaagagtcacatgatagatgcagtgtcctcctgtagatgtttccagtgttaggaacaattcccgatagattagcttgcatgtacacttttcccctttgccctcactaggagaaaacatatgtgtatgccagtgagtgagagtgaaacagagagagatagccctttgagtttaattaaaagcaaatcgtacaatctggagtactttacgtttgtaacacatcgtatctctcaactggtcatgactttgctggggagagtgtttagatgagatgattcagtcctctcctctctagagttctgccttctaagatccagttcttgaccataaggagatctgcactttgatttctgttcattatcctatatacaaatgtcctttcctcagagaggctacctttgacctttatctaaagaagcctccttcactccccaggcccccaaaactttctactcctaagctgttttattttcatcatcacgtttgtcaccattgaacattatcttgttcatcttgttttttgctctcttcctccaccaggatgtatgcttgccatttgtattcatgaaagtgggatagtggctctcttgtcacagtgcatggcgtataggaaacagtaattgttaaataaactactgcatggatgaaagttgaatacaaaaattagctgggcatgatggcgtttgcctataatcccagctactcgggaggctgaggcacgagaatcgcttgaacctgggaggcagaggtcgcagtgagccaagatcacaccactgcactccagcctggcgatagagcaagactcgtctcaaaaacaaaaaaacaaacaaagaaggttgaatacaaatacaaagcaaaagtttacatcatacagacttggtagatatgtttttaaaagtaaaaataaaagactgaaattggccagaatttatttctagggacccagctgtcagtgcagactccgtgtaatacctagacttggtgtgaggcatgactgagtatggttcagtttcctcctctaatcccgtaagatattagttctcaagaaaagagcccagggaattttaatttttactttggatcccgagcaggcatatttctctttggcctagcagaatttctttctagatctggatctgttctttgtaatgatttttgataaacaatattcaggatgtaaaatgcttagctatcatttgactgactccatcatcaggctttctcctacatgttcattttatcaaccctataaggtaggaactagcctctccattttacagatgagaaacctgaggtggttccaaagaattgggtaatttgcccaaggttcctgtttgcttggattggattgcagcctgactcttcccaccactctgtgtgctgcctcagatactataggatatgagttcttcctagagttcttctgactttgagagtagctacagctggtttccctgaaggcaggagttcctaaccttttggggttgtggatccctttgagaatctggtgaaagctatgaagaccttccagaaggatgcacatactatacatgccattttgcatacagtctctgggtatatcgacctgtcaatgtccattgaccacccccaccccccagttaagaattacccacttctggctgggcgtggtggctcaagcctgtaatcccagcactttgggaggccgaggctggtggatcacctgaggttaggagttcaagaccagcctggccaacatggtgaaaccccttctctactaaaaatacgaaaattagccggacatggtggcatgtgcatgtaatctcagctacttgggaggctgaggcaggagaatggcttgaacccgggaagtggaggttgcagtgagccaagatcatgctactgcacttcagcctgggcgacagagtgagactctgtctcaccaaaaaaaaaaaaaaattacccacttcttgccaaaatgcagcttcaagaaatgtaggaatgttctaggacagtgagactaaaacagaagcctctgttagccatcaaaggcactgacatcttactgtctgctgtaaatggcactccactgggcggcatgcagtatatttgactcacacatcaactttagcccttaaccccagtgggaaaaccactgtaaagatctggataccaggggccacatgtgtgctgatgcctgtggtttggtggggctacaacaggaaattcctgctttggaaagacagaaagcagatagccaaattctctctaccacattttggaaactatgtgtttgagtctgatcaagcatgatttagattcaaattcagaaaccatgtattagccttagttatgtgccaggcagtcctgcactggatccgttcatgtgaatggctctgttgagccctcaccaagacaaatacatctataaatgcctgttgggggttcaatatttaaacaaaatggcatatactcttcaggcaaacaggaactcttcagaattctctgctgtctatttgcgtagggaattgacagttctcacttaggcaaaatgacttgtgtgccaagatatagactttggtttcttgagcgtagctcagtgttccccaacttccatattcatcaaaattatgcatacggttgaacactcaaagctagacatagtgtgatgtaaaggattttttcaggctatcttctgggttgttgaggtggggcataatgcatgtgaaattgtttcttggaatgagagcctaacaaaggggaggactgtgttatattccgaccactgagctctgtattgcttgacactgcctttcaacctctgagaaataaaagttcacataccttaagtcgatggtcatgagagaccaggtcagggatggagtgtgaatgttgtgagctcattactgttactgcaaaagagccaaaagtagtgtttcagtatgaactatttttatacacacacaaatatcttttcttctttaaactagaatcaggtgctctggttttcattttataaatggaagggaaaccctaaggagagtctggttttatgttttagctttattttttaaaaatatatggtacctccttgagaatctgatgaaagcagacatcctgctgcctcttccagatgtgcctaagcctgtgtacacactcacacacacacgtgcacactcacagagacgcacgttcacattcagttaccgagaactcatggacctgtctgacctctgaagccagtctgcctgggttgaaatcaagttccaccacctactggctctgtggctttggccatattatataaagtgtacctcagtttctcaatctgtaaaatagtgctggtgatcctccctaataagatggattgcaggattagcagagataataaagtacttaggaagttttggcacatagtaaattcaatcagtgttagctatttttttattatttcattggtactttatgttatccaagtactctttatttgcaaatttgtaaatttaatcacattaaatattaatttttaaatactaaacattcaattttcatcattttttagtaaagtagaccttattaagacatttaaacaggtcctacattataaacataatttttgctgtgaatggaatagagccactgaaatgtacagtgaccctttagccagtaagctcatgcaagttttagctctaagaaaaaaaaaacactactctgagacatttaccaatatatttgaccatgtaactttttgtttcctgggtcatcttaatgaaagaatgctccaacttgagaaattctgctctgtgccaaaagttggctttttttctttccttttaaaaggacttattaattgttctttatgtttgcaatatgtttatagcttaggaattattttatggagtatcagaaaaggttatagatttacaaacaaaccttaagcttgtggagcaaaaaataaggcatttgttatgttctgtacttcttgtgattcttgactatatgagtgcaaatggcttattgagttattgttgagaaatataaaaagctaactgataacttctccgttaaaattttacaaaaacttaaacacttctttcaggctgcagaagatgtcaatgttactttcgaagatcaacaaaagataaacaaatttgcacggaatacaagtagaatcacagagctgaaggaagaaatagaagtaaaaaaggtattgaaaataattattagaagaataaaatttttttatactatagctactaaaactgaactcagttaacaagtgaatatatatttctctgggctgtttgttgcagatgaatgacgcgatccactctagttaagcagaaagtcattttttttttaagggatatgcgataacttacagagttgttgaggagcttgagtctagaccgaggttccaggaacaagtctcggagaacttggctggcggtggaacagctgttgcctccactgatcccagagtcagctgtcttcccaatgaggaagccacccttgcagacttaggaacaccaagctgctgctgccagtgccacctaccccagtaaatctggggcctgtgtccagccgtcccccttgagttgaaatccagctcaaatgcatttgattggtggaattgaagttattatcacttatgcatgctggcagaactttcattacccgcatgatttacttacaccctatcagcaagcaaggctgagaaatgtaggctggtttttttggttttgtttttgtaggaaggcagaattcacaaagtcaaaaattgttaaaatagaagaaattttgagtgaccatgtgcctgctgtccaccacagggcgcttattgtccagaggacaaagctttaggtagctctaagtgcttgcttgtgaaatgtcttctaaaaagttacaaattaaggtcttattctaatgtggtaataatacctttgtgagagggtccctcagagagttgctgtccccaaattacaattggcctttagcttctatcagagaactttgagtacattttctttgccattttgcatttatagaaacaactccaaaacctagaagatgcttgtgatgacatcatgcttgcagatgatgattgcttaatgataccttatcaaattggtgatgtcttcattagccattctcaagaagaaacgcaagaaatgttagaagaagcaaaggtatgttaaaggttaattctgaaattagaatttatatcactataaagaacatgtaattatagatgtagggaaatagtagatgctagctatagctaatatttactgccttgttatgtcccaggcatgctccgaatgctttgccagcaggattttgttgaatcataacgatgacctgttatcccaatttagggacaaagaatagaggcttagagaggttatgggatttattcaaagtgacacatagacagtggtcttctgactccagaaccttgctcaaaactaaaagtatttagaaggtatagcatatattgaagcagaaaagaaaaatcccctgtaattctgctatgcagaggtaaccattcatagtgaacattttcctgtatttcttttatgttctctctgcctctctccgtgtagtttgcttcccagttgggacaattaatgttccaggaggagcatttttgctggtttcattgaatgtttgtttgtccagcagatactcattggaagcctgctctgagcctggcacacaggcctttaaaaacatcgtttttgaagactgtttaatatcatgttgatggttatcaattggggtcacgggtcttattgttagcattaatttgtttccaatattttgctgtactaatgttactgtgagcattcttctacataaatctttgttcacatttagaaaattgttttgaggaaataattagagaaatataattactgggtcagtcagcatatgagttctctgataatatctgagacatttgatacatggtatgaaattttcagttcacatgccttcttactatttgggagggacagccacgttgtttgtctatgagaagcagatggcaattaaacctttcctaatgcttttgctaattaacctgattgcttaaaatgatagtctctcttcaaatgtcataaaaagcaaaacttcgtatgaatgaaacccacatttagtaagtcttcagaagaactatcactcctgggtctttccatgcataaatcttatatgtctcccttatgtttaaatcttttcttcttggtcaaattttgtgatttttgttctttttatttgtttaaccatttaaaaaacatttttattggaagtattcccagatagcttatggtttttgtggctattgtgaatcccctgccccatacacagatagctactgaacttttattttattttatttatttatttatttatttattttttgagatggagtcttgccctgtcgcccaggctggagtgcaatggcgcaatctcggctcactgcaacgtctgcctcctgggttcaaacaattctcctgcctcagcctcccgagtagctgggattacaggcgcccaccaccacgcccagctaatttttgtacttttggtagagacagggtttcaccatgttgggcagactggtctcgaactcctgacctcgtgctcgtgatccacccgcctcagcctcccaaagtgctgggattacaggcgtgagccaccacacccggctgaacctttctttttttactcattctagaattctagaatgaatggagtgcttactctgtatcaggttctgccatgtactagggataattggggacaacaaaacctgcctggcccctgcctgcatggagcatatagtctagatggaaagaaaaaaaagtaaacaaaactgataatgagtagaaagtgatatgaggatagaggtggctttaagaacacaggaagaggaatctacactagtctggacatcaagggtcagggaagggctcccagggaaagtgatgggataacagctgaggaataagtggctattagccagaaaggggcggcggggggcggggggttctagtcgtgagaagcaacatgtgtgaacggccataggatgacggtggtgcaaacatagacctgcaagaagatgtatttgctggagattgggagcacctgaaattgtggccacatcttggagaactccagtcagttgagttgaagaaattgtactttgtcttagcaggggtcagcaaactttctgtgaagggccagaagtaaatacgttaggttttgtgggctgcacagcctctgccataattactatgaaagcaagatgagtgaatctgcgtggctgtcttccaataaaacttgacaaaaacaagcttcaggctagattgggcctgtgggctatagtttgcccactcccgtcccagagcaaagaggagccttcagagatttttggaaaagagagagatgattggacttgcgatattaaaatgactttctagtgtcttattttacttattaaccaggttttctcggtatagaaatttagaatttatccctttctagtagccatatgtcttatttttgtttcttgttttgtaacagtgattctcaaacttagcatgcgtgagaatcacagtcaccacagggcttgttaaaaatccaggttgctgggcccgacccaaagacgatctttcaggtgggctgaggtagggccccagaatgtgtatttctaacaagttcccaggtgattttgtccctgacactggtctcggggccaccgtttgagaaccattggctagatttctaaaacggcaacactgtcagtattagatattctttggtttctaatgttagtgggtatttggtttgtgtgatttcatatttttttgtcatgtttaggaaaaaaaattgttttgatcctagccaggaaggaacttaatggcttttttttttttttttaaaacaaagagtatatgttaaaatttatttaatctattaatgagggaagcattaacattacaaaactggttttagaattgaagaggctaagtatctatagataggtaggtagaaagaattgtcctttggaattgtattttcttttttttaattataaattgacaatttataattgtataaatttatggtgtaaaacgggatgttataatttattaatacaatatggaataattaaatcaagatagttaacatgtctatcacctcaaatacttagaaaatatctgagttttcactgggcaaagctgctctttcttacaaatgaggcactttttaccactcttttccaaagtttagctccagaggcctcaaagttagtgaaaatttctgccagatttggatcataagttgttcttcttaattattggtggttggtggtgtgagtttctatcatttcctgtagtctcatagttatttttgttgttggaaaaagctgggttagaagccagcaggcccaggataaactatttatagaagtctttgtatttggttctttgttaggaaataatttagacagtaattttttactattttttagatcagcagaaactgagaaaacaaacttgatttattctgtgataagcagatatggaccatgaattaaaaatgcccacattcagacatttagatctaattatcagtgttacttagctgcctgtccaagtttagaaggttcttgacctaaaattcttcccaaatattatttcagacacagatgctcagaaatcatcctattgaatagaattaatttaaaatattttttttccagaaaaatttgcaagaagaaattgacgccttagaatccagagtggaatcaattcagcgagtgttagcagatttgaaagttcagttgtatgcaaaattcgggagcaacataaaccttgaagctgatgaaagttaaacattttataatactttttttatttgtttaataaacttgaatattgtttaaaatgataattttccttcttcaaatgacatggaaagcaaaactttcttttttaaaaattttcatttatttaatggaaacttgcccattttcacatgtctgcttatttattttatatttttaaaagaagacagtattcacctatgtattttgcataacgattatatcaagtctaggggcttcatgtcatgttattaaaatcagttaagcaatcttttatgtttctatattatttagaatatttgttgttgcaattttcacataagaaaatttaacagttgtgtcatgttgtttctgtctgattttaattgctgtctaatgacggggaaagcacgatgaaaagatgtacaatcctgcatccttgcttatttcacaactaaagctttgtcatagacttcaaaatatatatgtatatattttatttaaatatatgttacatattatatttaaacatacatatttaacattttttacatatctatcaatatcagagatttgggtaaaagaatgggtaatgtttaaacatgtggaggcatgtggagctttatacaaacagggcagaaccacagaagaacgttttagaaaccaagagatgtgcagaaagaaatgtttagtgttttttcgttttaaattttagattttattttagtgctttgtaattaattggggtttatattgataaagatgtggaagttaaacagctatgtatgtaaaagtaaggcttatttcttaaataaaggatgcatttcttcccactcccccacaaaagacaaacattttgggatttgggagacctaaatgtattaactttccagcagatggcactgatgtgccaaatgtgaatggaaggatcctaacacaacaatgagattgttaggattaaatatacataattttagaggaaatatttttaatttttaaggctaaactgcatatgtattttttggttcagtgtttataaacatgaattcaggcttaaagatagatgattatataatttctaaaattcttaatactataaaggcagttttttcttttcttttttttttttgagatggcatctcactctgttgtctaggctggagtgcagtggtgcgatctcggctcaccgcaacctccacttcctgggttcaagcgattctgccaccttagcttccagagtagctgggattacagggacttgtcaccactcccaaataattgtatttttagtagagacatggtttcaccatgttggccaggatggtctccatctcttgatcttgtgatctgcccgcctcggcttcccaaagtgctgggattacaggcgagccattgtgcccggccaaaggcaaatttttaaattgctgcaaaaatcttcccaaatagtgatattccagttctggaaaatgactcttaccaaaaaaatgcaaggatatttttttcttgcatccatttggttaatgttcagttagaggattgaggctggggaggtagtcaatcaagttgcagcaggaaataagatcagaataatttgaggaaactctcaccaaagttaacaatggtgccgggtgaccactagggtccttttggaccctcaaaggccaggggagagagcaactgcccacttcactccctgaccagggaaagttgcttttcatctggggaggaacacagccagcctgtgtcatacctgcagtggtagagccaggggactagacatcctgacctcattctccctccaaaatccacctgtgtcccaccattggccaaacccaaccagaatccggaggtggtccatagaagtcagtcgcctgcagggcctgggaggggtggggaatggataggtctggggatcccccagtggaagatctagcataggagggcgactaaagtttagccctttagaaatgttaacaacgaacactcgcctgacatgggccaagagactgaactatgtaattcactgggacttcaaattttgtcctgcatattatcaagaaaacctaatacaaaaacccaaatatctaacatcagtgggatggaagcgtgtgatgttgctaacttcattttcttaacttacctgtgacattttagaacattacaaatatttgattcccattttaagttcatttctaaagcctttgcttatttttgtgaatagtaacttccctgggctagctgaagactggggaacagcacgcggtgcatctgaagggaaaggaagaaatgtcagcttcagccagtagttgcgacagagggaagttttgatctggatttgtcactaacttcttttttttttttaagcaggaatcttgatttgcatgtgcaatcactctttttagactgggccactatttgttttttaaagcagtgcaggctacacaacagataattgcacaacagatctggccctgagactgccaggttgcaaagtcaggtgcataatatgatacgtcatgtgcaggcttttcacaggaagtggtagtagaagtcttctgagcagctatgctttgctgctgactgtaatgtttcattatctctcacatccattaatttctttccatctccacaactactgtgatccttgtccaagccttgtgagctctagtcaaaagcatggctaagtaagggagcaaggggatggaaaagccatttgaggtagggtttcgacagggggtctctaaagggttttgaatagaaaggagcagtactttttaataatttggcagttgttaggtgggctttactgtagaaagatggaggtagaaatactggatgttattgtaccttttctggtgagccgaatcagttggctgaagaaaagatacaccaggacttagagaaggggtgaaatgaacaaattttgtcaatgattggagaaacgaaggtgaagctagaaggagaaacccaaagagaagttggttttgagcacaggccagtacagcttgcaacaggttttctttggcttctatagtttaacaaagaaaaaaaaaaccctgaatttgttgccacaatcaaatccagagatctcacataaaaatgcacggtttggcaacattgaaaccatatttctaaaaggcagtcttcagctgctcatgcgttagacaaagcaggctgtctccagttcaccccagtccccacctagcccactaccctcatttatattacctgcgtggtgcctgtctgtatttgctttgtaatctctggatgcctgctggtagtgtaagcagaggcaggaaagaaagaagtgtctggtttgcaggaagcagggcagaggagggggagggtgagagaagggcacgagcttggcatcagcacttggacttcccagggcatcagccacgtggagacatgtaattggcaaccggaaaagtgtgttgaagtttaggatatgcgggactagggaggtatatttgagaacccttttcatcctacagaagggcttaacatttaacgcacataaaaatcacccggggattttgtgacactgcagactctggctccgtgtgggctcgggctgagatgctgcctttctaacaagctcccaggtgacgctgctgctgctgagccctggtgccatgcattggacagctaaggtagcttgccacgaagaagaggacgtggggaaaatgcaggtgggaggaaaaagaaacagcaaaggagacagaagctgcaacggtaatgggagatccgcaagagtgtggaatcccagaagccatgatgagaatgctgaaaggaggagggagtgtgatcaacagcaaatagtacagtggcgaagccaataagagccgagaagatggagctctatttgatgactaagaaggcccttatttccttcaaaagagttaacccacccctactccttacacacaaactggagctccaaacaccctagaccccctgacccgaggcccccacacctgagccccatacccttgaaccccacacacacctgagccccacacacacctgagccccacacacacctgagccccacacacacctgagccccccacacacctaagcctcacacaaagctgagttcccataaccctgagccccgaaacctaagtttccccacccctaagacccccacatttgagccccacacacccgagtcctacatataactgagtccccatacacctgaggcccccagactggagcccccatatactcaagccctcccacacacgaactccccacagagctgagtctccatgtacctgatctccccacacctgagctcccatatacctgaaccctacacacacctgagacccccatacctcagcccctcccacatctgagcccacacacacctgagttccacacacacctgaggaatcagctccctcccgtcaggcaccagtgattctcgggggtgataattgtgtggtttgaaaaagcctgaacacattaggtgctgaggatcaaaaatacatgaacaattctctagttcagcgtttctccaggtgtgaacatggaaccaacatcacctgggaacttgttagaaatgccaagtttttcacaggactaaaccctgaaaaaaaattcccccactgggcaatgatattgagcaacataatggtcattgccttcaaagatgacttcatagcaactctgcagacagggcccagggttttaacaagcactccaggtgattctgactcagcgaaagagctggtggggttcaaatcattccatctttctgggattggagggcgtgggggtggtgttgggggaagagactggagcaccaactgagaattcttaatgcagattatagtgctggagagggtaacaaaagagggcagcatcaaagagattgacccatccagtttagggatcgagggtagctagaagcattccggttgctggtagtaaacagattataaaagattaagcagtaggtggtgtgagacttggaggcagcaagtgaaaagtatttttacaagaaagttaacagtggtgggaaagaggcagagcatcacttaatgtcactgtggtgcagatggaaaggctttttttttttttttggactagggaacacatgaatacacacagtagatgagaaggagccaggaaagaagatgatggaaaagtcaacggacaagaggtaatagttggagcacatctgtgaaagaaaggggtgctgtagtgcttatacaaacggtagactgggaaaacacagaattaggtgtatatgttacaaaaactcctaaggaataaatggtagagaaaaaaatttagaatagtgatgaactgtaggaggaagatatagttggggtaggcaaaaacaggaggaggcttcaataatctttatgttctatttcttaagttgggtcatgggtccatagttattggtagtcaatatgtttattattaattattttatgtacatgaaattcttcacaataacaagtttttttataaagttctgttgtggcacaaacaaactaggaaaaatgtgcattactgtggcattgttattgatatttctgtattgcattcaactacttttttgtcatttgacataaaatggatcatggtgactctccagttttgttttgtttttttcttatagagacagagtcttgctctgtcacccaggctggagtgcagaggcatgatgttggctcagtgccaacctccgccgcccgggttcaagtgattctgttgcctcagcctcccgaatagctgggactacgggcccatgccaccatgtcctgctaacttttttgtatttttagtagagatggggtctcgccatgttggccaggctggtctcaaactcctgacctcaggtgatctgcccacttcggcctccgaaagtgctgggattacaggtgtgagccacggcgcccagctgactctccagttttaaaagtagaaaatcagcaacaaccaaaaagttaaaagttggcttacagatttggtatagaaaattgtttgtgcaacagtcattagcatccgtttgtatgtagaaatttctggtaactaagttctttgatcctccattctggtatctaggaataactctagtgatggcgacgttaacaattagctttgagtgcttattgtaggctgtcagtcttctgaattttttttatatattccttcctcacaagagccctttaaagtagattctttaccatccctcattgtgcagaagtagaggaaggtttagagacgttaacctgccccaagttttgcagcttacttagcaaatgggtggttaatgaatgcacaagttgtacttttgaaatttattttgttagatgattttatttgtgttctgttacttatccaaaggaatttcagatcggttctcatatagacatataaaagtatatgtgtgtatatataaaaatgtaaatatagcattaatagattaggaaaaaagaaagggagaataagttggtcacagagtccacctttcagattgatgtactctgaacctctatgtagctaagacagagaaggaaaaatgatgagtaataccacattggaaagggtgttatatatgaatatctcaggagacaaaacatctttcagaggtctaaaccttaaaaaaaattttccctcattaggcattgactttgagcaatgtatcagatgctaactttaacaaagacttcaaagcaaaggcaagagcaaaattcatatggccaattcttgtagcaattaaacagttaacctaaatccaagggaaataatttagaaagaggccgataatacgcagccaacatccacagatgtaccctgagctaggcattagatatcttatgtaccctgagctaggcattaggtaagtattcacatacattaatcattacaaggtacaaactagtattatcatcatgtccatttacagatgaggaaacagaagcccagaccaaagttccaaggcccctaagtgaggagccagaactcaaacccaaacagtggggcttccaatctgtcctcccaaccattctattgcaatattgaagaatcttcttacaatcttcccagatccaaggacagtccataggtcacttcaaactcagaatttctcttcaaataggaattagagagcagaataatgatggcctttgtctatgaattaaattaaaagaccttcttcctaggaacccattttaattcagtcctataagatagcaaaggtatcagattatacccacagaacacctggaattctgaacttgaccactgtgcacaataatattgggggccaggcttggtgagccaccatacaccatatggagtatggaggctaggggtgggtagatcacttgagtttaggagctcaagaccagcctgggcaacatggtgaagacttatctgtacaaaaaacacaaaaattagctggatgtgtggtacatgcctgtggtcccagctactaggaagactgaggcaggaggactgattgagcccaggaggtcgaagctgcagtgagccacgatcatgccattgcactcagcctgggtgacagagcaagaccctgtttcaaaaaataaaaattataaaaggaaaggaaaggaagaaagaaaagtattggggagggataggttctattgggaagggacaatgaacaccacagccataaattctgattaattttgtaataatacctctgacattcacaatcttattgtaacttggagtaacgctggaattattggtagagttcgataaaacctatagtaacacagatgagcaagtgtactagaaaactgaattaaacttttctcagggtgtgatactgatggaaaataattgacctgaagaggacttgcagttaattaataatctattaataattgttttaaatcatttgactcaaacttataaagtccaaattatagtagctgatagtggcataagaactgctacactcatgcaaaaatatgaaacttatgtccaagaatcttggtctgcttcacctctcccatccttgtcgctaccaccttgggctaagaggcagtgagtgtttatttggactattgctggtgtcttctgatgggtctcccagcctccattcttactcacacacgtccccttcaatccatttttgtagccagataatctttctcagactgcaaatctaattatgttactctttctttgataaccacctcctcccccctccccccaaaaaaattaatgttctcccccttggtgagagtagtgaaaatgaaaacacctgacacagcctgcttggtctgaaccctatctacttttccacttcccctttgctctccacaccaaccacaccagccttatgccagttccccaggtttattatgcaccctttggtcatagaacctgcatccttaccaggtcaaagccccagatatactttcatagttccacatgcttctcctttgttgcaagaacagctattacatttatattgatcattgcaaattattgacttgtcttcctcattagactgaaatcaggaaccatgataatgctttgcttattcccatcttcccagcccctgcctaccatgaaatcaagcacacgacagtgctcaatctacactggaatccaacagttctgcttgatatggtttggctttgtgtccccacccaaatctcatgttgaatcgtaattccgaacgttgggggagggatagggtagaaggtgattggatcatgggggcagatttccctcttgctgttcttgtgatagtgagttctcgtgaaatctgatggtttcaaagtgtgttgcacttccccctttgctgtctgtctctcctagtcacccatggtaagatgtgcttacttcctcttcgccttctgccatgattgtaagtttcctgaggcctccaggtcatgcttcctgttaagcctgcagaactgtgagtcaattaaacctcttttcttcataaatgactgagtctcaggtagtcctttatagcagtgtgagaatagactaatatactgctcctagatgtgtacctaatagacatgaaaacttgtgtccatcaaaatacgtattaaagaatgctcatgcaatagtcctggtttaccctagggggataatgtgcccaggccatgcttgaaaccatggatggtactctatatatataccattttttcatatatatatatatctccatacctatgataaagcttaatttacaaattaacacagtaagagattaataaaatagaacaattataaaaacatactgcaataaaatttatgtgaatctgatctctttgtctaaaataatattttattgtgctgtactacgggtaactgaaatctcacaatgtgaaactgcagataagtggggacttacttgggtagttttattctgaacagccagaacctggaaacaataatattatcaacaggagaatggacacatacattgtggtctagtcatacaatggaatacaacacagcagtgaaaaagaacatctcattatgactgcaaaaaaaaaaaaaaagcctgaatcttacagacatattgttgagtaaaaaagccagacacaaaatagtacattctgtattattccacttatatgaagtttagaaacagtggagggtagggaaaggtcaccgcttagtgaaggctaatagtaacaactatttatatggaacatttacaaaatcaccagcactgtgcagagaatttgacatgatcctaactaagtcacctccccagagcttaccctggatttttttattatccccattttttagattaagaactaaggctgtgagcagggaaataccttgcccaaggctacattgctggtaagtgcaactctgcacaatctcacggtatcctgacaattactgttagtcatttcttacagtgctgcacaagacacgtctgtcattgttttgccagaggactgtgtgagataagatgctgagcattcccccacaaggcctaagacatagtaatgactcaataaatatcatctattatgatcagtcccatgaaaataaaaatagaggctccacgaggtggctcaaggccatatagctaagtggcattgcatttgtgcagttttgattgtgagttctattgttcaaattgattctaagtgacttacatagttactctaaatgcagcaccacgctatgattttcatgggtgttgagtatttttgcctgcctgagccccttctttcataagccaaatattaaaaagcatattttatgactgccttgggacaggcaaatgtaacccaggctggattatattcaccctactttctgattttaaaagaaactaaacattttcataggcccttaaggtgccatgggccctaggcattctgcctcctgtgcctaacagggaagtaggccctgcctcaatgcagatgagattgtcacgtgctgggtgaggatggtgggtttcttctggggagtggaagaggctgtggttgaaaaagacaactgaagatgaattctttgttgatgagattatatttgtcttgttcttttttaaaaaatagccatacataaatgatttagccaaaggcatgaaatgtcatttgggttcaagtgattgtgaagcgtttttgatttaacaaaaaatcataaaatgatccagaaaaaataggagactgcaattcatagaaatgctattttgtgcgattttatctgatttggaatggggttgaggagaagtaattgatgaaatgttatgaaatgctagaatttaaataggcctgatgtaaataatgaagcatgctttcaggctttcaaaatacacaattctagtctcagtttaaaaagtggtcagttggagccaatctaaacatatatagagactgatagcagcaaccatggcatagaatacatgtttccttcaaagttttaaattacctgtttgcctagagtctgaaccctgctagaaggcctttgaaaaagcattgaagggggagaaaaatccctcaaacaacttacatagtatttgtccatgggatttgaatggctcttagctagtaactggtgtttgcaatcttttatggaggtctttaaaagcaaacaaacacataagaacaggggactgaagtagtatactgaacacattctgaatgttatggaggacacaacaggatacttacacatcttcattttgtgcacttaaccatgactgcgtgctgcacaagacaatgggtaagtgtaacatatgagttaattttggcattatggctgctattaatgcaaaaccaggacaacacaaagacaatatcacacctttccattctgtcaagaatggtgggtgcaagtgctctcaggacccagtaatagaagagcagatgaatgtaaaaccaacaggaaagccatcatcagtgcaaagaaaatgggtgcagagataattttttttttttttttgagatggagtctcactctgtcacccagctggagtgcagtggcgtgatcttggctgactgcagcctccgactccctggttcaagtgattctcctgcctcaacctcctgagtagctgggattacaggtgtgtgccatcatgcccagctaatttttgtatttttagtagagatggaatttcaccgtgttggccagaatggttttgatctcctgacctcgtgatccagcctgcctcggcctcccaaagtgctgggattataggtgtgagccaccgttcccagcccaaatgagataatcttactctgaccccaggtgtgttcagaccagaagagctacggctggatctcacccagatgtctctgatgactgtggggctcacatcagtgaatgaggcagggtgggctggtcacagctatcttgcttagagggagcagaactctctaggtgaccacagttttatacccaccctgattgtctcaacaatgaagtcgctgtggcttttatggaagagcaatttctaggttgtctttcattttatgttgatatcatggtttttagagtacttggcagtgggggagacggtgatgacaggcaaagatgtgtcgtacaagaggaggaaacagccctgtggcttcagccagctgttgccatggtggaatgtgggcaagactggccaagctttctgactgtccaagaaaagccagtaatctgaaattcttttgtgtgaaatctcccaatttctaaatgttgctgaatcattcaaagatttaaaagacattaagaagaacatgacaatgaggaaaaaatgacaaacatcagcaaaccccagttcccagactgccaattcataacccagttcacagaccaccaactcacaggggaatctgagcctttgtagaaaccagtgagggttgaacaaagccctttaataaatagtaaaaaggaaaatctcatctttcctttggaattttaaccaaacaacactatttaacaatgtgttctctatcttcaacctataggaagaaaccctttccttaacctacacaaaaagtaaataaatctacggcaaggatttttttttttttttttttttacaacatcaatgaatggtttaaatgtgatttttttagtttatgtctttcccagttgctatcatgggttaaaagagattgcagaatattgcacaaaaggaaagaaatatgaagttgcttcaaaagatgaaaaaacagtaatgggcagatttaaaaaaaaattgtcaagaaaatatccaaacaaacttaaatgtcaccagagagtttgccaataagtccataaagcaaaaagattattaacctcaagacagagctactgttgggatcacaggaaaaccatcagctgtgcaccatttttattgacacttcagggtaaactaataaaactccccatttcaattaaattttggaaactcatgttccctttttcttaaatgctgtaaaccagcttataaccacacagccccttttttctaaaatctcctcttggctgaggacgtggagccaatggcacattctagcatttttcttactatggctttcctggacacaggcggctataagacgtgatgttaatgaaagggggaattgtaactatatggttttcatttttgcaggtgagcttgttgagccattttgaaatcaagtgctcctttagggtgtgcttagtgttccttttcaggggttcctggaatcatgtccgagctgaaacagatcttggggaattttattacagattttacagactggagaattgaggcccagaatgtctaaccctgccagagccaaagagcaagaaggagtcaacttcaattccatgtctttggtaggcatccttctaaattgactcccacttacccctgcctcctggtattcatggctctgtgtagtcttcttcctttgaacgtgggctggacctagtgacatgcttctgatgaatggaacacagcagaagtgatggatgtcacttctgtgtaagtcacaaaagactgtggctgccatcatgcttgccttcgctttttctgacacacatactctctctctctctctggctcttctcacatgcttgctctaataaagccagctggagaggcccatgggacaaggaactgagggaggccatccaccattgcaatgaaggaacagaggccctcagcccagtcaccctggagggactgaattccaacaacaactatgagtgagcccagaattggagccttcagatgagaccacaaccctggctaacaccttgattgcagctttgtgagagatcctaagccagaggcccccagctaagtgatacatggatttctgacccacagaaactgtaagttactctatttccatagtttggggaaatttgatacacagcaatagatagctaccacgatgtccagggctcttgactctaaggccggcattctttgtttcattggctgcctttatattctttgtagatatctgcatcctattagtgatcactggcagaacaatgtactagttaatgtccaggatataaagataagagtggcagagtccttagtatcactgcattttgctttaggactagaactatattttatttttatttatatatatatatatatatatatatatatatttatttaagttctagggtacacatgcacaacgtgcaggtttgttacatatgtatacatgtgccatgttggtgtgctgcacccattaactcgtcatttacattaggtatatctcctaatgctatccctcccctctccccccaccccacaacaggccccggtgtgtgatgttccccttcctgtgtccaagtgttctcattgttcagttcccacctatgagtgagaacatgcggtgtttggtttcttgtccttgtgatagtttgctgagaatgatggcttccagcttcatccatgtccctacaaaggacatgaactcatcattttttatggctgcatagtattccatggtgtatatgtgccatattttctttatccagtgtatcattgatgggcatttgggttggttccaagtctttgatattgtgaacagtgttgcaataaacatacatgtgaatgtgtctttatagtataatgatttataatcctttgggtatacacccagtaatgggattcctgggtcaaatggtatttctagttctagatccctgaggaatcaccacactgtcttccacaatggttgaactagtttacagtcccaccaacagtgtaaaagtgttcctatttctccccatcctctccagcacctgttgtttcctgactttttaatgattgccattctaactggtgtgagatgatatctcattgtggtttggatttgcatttctctgatggccagtgatgatgagcattttctcaggtgtctgttggctgcataaatgccttctcttgagaagtgtctgttcatatcctttgcccacttgttgatggggttgtttgtttttttcttgtaaatttgtttgagttctttgtagattctggatattagccctttgtcagatgagtagattgcaaaaattttctccattctgtaggttgcctgttcactctgatggtagcttcttttgctgtgcagaagctctttagtttaattagatcccatttgtcaattttggcttttgttgcccttgcttttggtgttttagacatgaagtccttgcccatgcctatgtcctgaatggtattgcctaggttttcttctagggtttttatggctttaggtctaacatttaagtctttaatccatcttgaattaatttttgtataaggtgtaaggaagggatccagtttcagctttgtacatatggctagaactaaattttaaactggccatcttaatgggatacaacagggcttccaaataagactagtttccttattgggaaaatgaatatgacaatgcctgtatcattgttctattgtaagaaataagaaatgcttacacacacacaatgctctctgtgtgctgagctctacacaaagcactttattaatattaactcatttaattctcataattttatgatgaagacagtagcatcacccttcattttacagacagggaaattgaggcatatagattttttaaaagattacactggtgaaaggggcagaaaaaagattcacacctgaggcgatcgttgagttctagagtctgtgttttaacaattttactttcttgcttttagaacaatgaagaacaatggaacaacatatataatatcttagcacagtactcaatacatattaagtgctcaatatgtggctgctattattattattaaagatacacttccattgtggcattggctggcaatggcagatcctgcatataacaaagattttatgaggttttgatgaaagctgacctgaagcactcaaattctttaggatatctgtcaagtgaaaatgccagcatttaaaaatgcttggatctaaagatatcaggatactttctattgaatgtgatctaaagcaaacaaacagctagccaaaaatttctcctctgtcttgcttaggctaagaagcaaatgtattgtcacgcataactgaacattcagaggcaggattggcttcaggcaggctggattcaggctcatacaatgtcatctggatttattcctcctgccatctgctatgctagcttcatcctaagactacattcaatagtgcccagcatctccaatccacgcccttctgtcatcatggagagatgattcagtagctccatctttatatgtttccaagtttgggccacatgaaagaatgaaaaccttgtagagcttaaaaaattaaagattcattctgattggactggcttagtcacatgcccatttctgattcatatcagagagatatggtggtttgagaccaggtcatgtgctcttctctcggaggtgtaagtggagtcacatcctgacccatgaactagagcagaatgggctactatccgagaaagtgggaactgatgtcaggggctcactgcaaaatgttgaagccttaacatatctacatgtttgatgtctagttctttatagagagtaaatatatgagtcttccatcattttgattcttgcttttgtcttgtgtactcttttgatcattatttttcatagtctgctttcttatataactcaacatttacaataaggtatcctagcaagcactttttaaaaacatatataactgcaaaaaaagaatggaccacttttctgggactgtgcctattgaagaaatgtgggctttattattatctcttagttttttgtgtaaccttttaaagtgctttatagctctctctcctcctatatttatctttcatttgaaacaagtgaaaaacgggatcaattcttggcatcagaaggaaatgaatacctagcaaaactgcatcactttggaaaccagtgcaatgaataactacccttaagctttcaacaacacaatttatagttgaattctttatacggctgacatgtcttggacgtcacacaagggattcagttacatcttgtattagttatctatggctgtgtaacaaatcaccccaaaatttagcagctagaaacaacacacatttattgtctcacaatttccgtaggtgaagaatctgggagcagctcagctggatagctctggctcagagtctctcacaagactgtactcaaggtgtcagacggggcagagtcatctcaaggctcagctgcgggaaggtctgcttcgcagctcacatatgtggccattgtcagatctcagaagctctgcttccaagcttactcacatggggctctccactggtctgtttcacgacgtggcacgtggcttcccctagagcaagcaatgcatgagagagtgaaagagagcacccaacagggaagcacaagttttctgtaacttcattttgaaaatgacatcccatcacttctgccatgttctcttcctagaagcaagctgataagtccagcccacagtcacgcggaggggattacccaaaggaaggaataccaggagactagaaggcaggacattgaggaccaccttgagagcctgcccactacacctctatactcagaggactgtgttacaggacagtttaatctctaggcaaacacagaaccaataagactataaagcaaatagttttacaagatcccagtgtggtctgtataggcatttatttttcaaaatttgattgattttttttctctttagctgacaacattgattttatttgagggagaaaaaaacccaccaacttaattattgatttcatttgaaaagactttttaacatttggagacttctggatatactttgagagtaaaaaaaagaaacagaactgaagattcacctactaaagaaatggctcttggccgggtgtggtggctcacgcctgtaatcccagcactttgggaggctgaggtgggtggatcacctgaggttgggagttcgagaccagtctgaccaacatggagaaaccccatctctactaaaaatataaaattagccaaatgtgttagctggcgcctgtaatcccagctactcaggaggctgaggcaggagaatcacttgaacccgggagatggaggttgcagtgagctgagatcacgccattgcactccagcttggacaacaagagcgaaactctggctaaaagaagaaatggctcttaattttacaaggtctgctttacagctttgtacgtataaagcatattgacacattgaaaggaaacaattgggaaatagtgaattaagaaaggctgtgtggctaaagaaaagatcacgtttaatttgatagaaaatggacttatagagatgaaaaatgctgtagaaatggaccgagacaaggcaacccaaccatttttcacttttacatgtgagtatggttttgattctattcaaactctggcttttctagaaaaaaaaaaaagagtaactggctagaaagttattcatttccctttatgcttgggaatgaaataaaatgtgttcctctttttgaagttgtgcgtgctttcctttccgtcgaggttacttatgaggcacatggaaataagggaatcaatttcttcctcttcttgtgctacaaacctttataaaggttgctataaatgtcataactgccttgtttcctgaaaagtaatttccctgtcattccgatctgttcctttgagataccatattattggtctatgatgatttctttaaagtgcgtcaaagtatgtggtttagtgtatttttcttatttcactgccttacagtgaatttctcactcacttcaaggcttgctcctaagtcaccaattattcataaaggattgcttgattttatcctcctaatgaaatgaattaaggttgaagaaaagcccttaacagagcataaaatgccaaaaagaccttaggaaattataagtccttccagctaaaatgtgaatttaactacaagaagaggaagaagcaggagaaagaacatgcttagaaatggtggcatgatgagtcctatagaggtggacagaggggaaaggaagagtcatagttcagcatttatggcttccgtattgtcaatatccatcagatgcattaaaaacaatcctagaaacgaacagaaaggccaggaatgcaacagcaatcacagtgatggtcctaaagcatctaaacctcctctgaccgcacagtgtctctgataccatgaagagtagaaggacagatgagcatgagggtaaatatacatatggaaaatgtttgtttttacttgtacaccaagaaatcactggctcaagctcacaaaatgcaatcatattttattacattttccagttattcaagactcaactataccagaaaacatcttaaaaaacacttttaaacaggatgtgaatgctttgtattacacagcttaatgtaattgatttagagtccatgaggaaaaccaattttccttttttttttgtgagacatattgatttaagggaaaaagcagtaattgattgtatctttggagatcaaaggtgagttgatgagagaggaaactggaaaggagagagaaaaagacatagatagaaagagataaaatgaggtctgaatataaacatctatttctgagatttaacttattatcactaagttttcattttccccaaatatttctcttcaaggaacagaaatcattcggattcagatctgtgtgcatgcaaagaatctgtatgtgtgctctttggctgagcccatttgtaaaataaacaagaaacatagagctgttaagaaataagatgagccaggacttacaggcacagatgtaccctcatcttttggatatttatactgagttttcttaagcactcaaaactttggaaggattttaagatgcttcatagagtcatttgtctaattggatatctaggagagcaatatctaggaagaatgcactcatttcagaaaacgaaaagttatttgtaattataatagcgggcttttctgcctctttttggaactggtagtgagcatgctggctcagttcctcaccctatgcctccttttcttgcttttaaatcttctccattatctcctttattatctgctatttattttactgaaggtaatcactgctttattaatcactgcttgagtaaccacagtgggacttgaaatgagcttgtttggattgtaaaagtcacaaatgctggtggacctcttgaaatttccctttttcccttcacttttatgagaacttccacgtgtagaaatgtcatgggcgaccagaggtggtttagtgtttctgaagcttggagaaagggaatttgaagatacttttcaggtagcatacacgtggtgtgtcacggtaaaccataagaaattctcattgcttacatgaaagagacttggtttgcttcaagagcaaaacaataaaaatggtttttgaaacaaaagtaatttaggcatccagtttgtttttcggaaataaaaactcaaatgtgaattcattttgaagctggtaattacattttgtttctaatgtagttgtaagaaagacttataaaaactggatttcaaatagcttttgcaaaataacctttgcgtttagttaaataatcagggccaggcgtggtggctcacgcctgtaatcccagcactttgggagactgaggcgggtggatcacctgaggtcaggagttcgagactagatggagaaaccccatctctactaaaaatacaaaattagccgggcgtggtggtgcatgcctgtaatcccagctactcagaaggctgaggcaggagaattgcttgaacctgggaggcagaggttgcagtgagcaagatcacgccattgcactccagcctgggcaacaagagcgaaactccgtctcaaaaaaaaaaaaaaaaaaatcagaagggaatttcaattttccttgaaatactactagatcttagaaagtaggggcgttatcaccgcaaaaacatgccaaattgtaaggaccatcgatgctaagaagagactgcatcaactaacgagcaaaataaccagctaacatcataatgacaggatcaagttcacacataacaatattaatcttaactgtaaatgtgctaaatgctccaattaaaagacacagactggcaaattggataaagagtcaagacccatcagtgtgctgtattcaggaaacccatctcatgtgcagagacacacataggctcaaaataaagggatggaggaagatctaccaagcaaatggaaaacaaaaaaaggcaggggttgcagtactagtctctgataaaacagacgttaaaccaacaaagatcaaaagagacaaagaaggccattggataatggtaaagggatcaattcaacaagaagaactaactatcttaaatatatatgcacccaatatgggagcacccagattcataaagcaagtccttagagaactacaaagcgacttagactcccacacaataataatgggagactttaacaccccactgtcaacattagacagatcaacgagacagaaagttaacaaggatatccaggaattgaactcagctctgcaccaagcagacctaatagacatctacagaactctccaccccaaatcaacagaatacacattcttctcagcaccacactgcacttactccaaaattgaccacatagttggaagtaaagcactcctcagcaaatgtgaaagaacagaaattataacaaactatctctgagaccacagtgcaatcaaactagaactcaggattaagaaactcactcaaaactgctccactacatggaaactgaacaacctgctcctgagtgactactgggtaaataacaaaatgaaggcagaaataaagatgttctttgaaaccaacgagaacaaagacacaacataccagaatctctgggacacatttaaagcagtgtgtagaaggaaatttatagcactaaatgcccacaagagaaagcaggaaagatctaaaattgacaccctaacatcacaattaaaagaactagagaagcaagagcaaacacattgaaaagctagcggaaggcaacatataactaagatcagagcagaactgaaggaaatagaggcacaaaaagcccttcaaaaaatcaatgaatccaggaggtggttttttgaaaagatcaacaaaattgatagaccgctagcaagactaataaagaggaaaagagagaagaatcaaatagatgcaataaaagatggtaagggggatatcaccaccgatcccacagaaatacaaactaccatcagagaatactacaaacacctcttcgcaaataagctagagaatctagaagaaatggataaatgcctcgacacatacactctcccaagactaaaccaggaagaagttgaatctctgaatagaccaataacaggctctgaaattgaggcaataattaatagcttaccaaccaaaaaaaaagtccaggaccagatggattcacagctgaattctaccagaagtacaaggaggaactggtaccattccttctgaaactattccaatcaatagaaaagagggaatcctccctaactcattttataaggccagcatcatcctgatactaaagcctggcagagacacaacaaaaaaagagaattttagaccaatatccctgatgaacatcgatgcaaaaatcctcaataaaatactggcaaaccgaatccagcagcacatcaaaaagcttatccaccatgatcaagtgggcttcatccctgggatgcaaggctggttcaacatatgcaaatcaataaatgtcatccagcatatgaacagaagcaacgacaaaaaacacatgattatctcaatagatgcagaaaagacctttgacaaaattcaacaacccttcatgctaaaaactctcaataaattaggtattgatgggacatatctcaaaataataagagctatttatgacaaacccacagccaatgtcatactgaatgggcgaaaactggaagtattccctttgaaaactgacacaagacagggatgccttctctcgccactcctattcaacatagtgttggaagttctggccagggcaatcaggcataagaaagaaataaagggtattcaattaggaaaagaggaagtcaaattgtccctgtttgcagagacatgattgtatgtctagaaaaccccattgtctcagcccaaaatctccttaagctgataagcaacttcagcaaagcctcaggatacagaatcaatgtgcaaaaatcacaagcattcttatacaccaataacagacaaacagagagccaaatcatgagtgaactcccattcacaattgcttcaaagagaataaaatacctaggaatccaacttacaagggatgtgaaggacctcttcaaggagaactacaaaccactgctcaccgaaataaaagaggatacaaacaaatggaaggatattccatgctcatggataggaagaatcaatatcctgaaagtggccatatgcccaaagtaatttatagattcaatgccatccccatcaagctaccaatgactttcttcacagaattggaaaaaactaaagttcatatggaaccaaaaaagagcctgcattgccaagtcaaaagaacaaagctggaggcatcatgctacccgacttcaaactatactacaaggctacagtaaccaaaacagcatggtactggtaccaaaacagagatataggccaatggaacagaacagagccctcagaaataataccacacatcgacaactatctgatctttgacaaaccagacaaaaacaagatattgggaaaggattccctatttaacaaatggtgctgggaaaactggctagccatatgtagaaagctgaaactggatcccttccttattccttatacaaaaattaattcaagatggattaaagacttaaatgttagacctaaaaccataaaaaccctagaagaaaacctaggcaataccattcaggacataggcatgggtaaggacttcatgtccaaaacaccaaaagcaagggcaacaaaaaccaaaattgacaaatgggatctaattaaactaaagcgcttctgcacagcacaagaaactaccatcagagtgaacaggcaacctacagaatgggagggaatttttgcaatctactcatctgacaaagggctaacatacagaatctacaaagaacacaaacaaatttacaagaaaacaacaaccccatcaaaaagcgggcaaagggtatgaacagacattctcaaaagaagacatttatgcagccaacagacacctgaaaaaatgctcatcatcactggccatcagagaaatgcaaatccaaaccacaatgagataccatctcacaccagttagaatggcaatcattgaaaagtcaggaaacaacaggtgctggagaggatggggagaaataggaacgcgtttacactgttggtgggactgtaaaccattgtggaagacagtgtggtgattcctcagggatctagaactagaaataccatttgacccagccatcccattactgggtatatgcccaaacgattataaatcatgctgctataaagacacatgcactcgtatgtttattgcggcaccattcacaatagcaaggacctggaaccaacccaaatgtccaacaatgatagactggattaagaaaatgtggcacatatacaccatggaatactatgcagccataaaaaatgatgagttcatgtcctttgtagggacatggatgaagctggaaaccatcattctcagcaaactatcgcaaggacaaaaaaccaaacatctcatgttctcactcataggtgggaattgaacaatgagaacacatggatacaggaagggggacatcacacaccggggcctgttgtggggtggggggagaggggagggatagcattaggagatatacctaatgtaaatgacaagttaatgggtgcagcacaccaacatggcacatgtatacatacgtaacaacctgcatgttgtgcacatgtaccctaaaacttaaagtataataataaaaagaaaaagaaagtaggggcattatgaatctacacaggtgataatatttcatagacacacacacacacagaacatcatgtaaaaactggtgaaatctgaataaagccaatatttgagttaatactataataccagtgtcaatttcctggtttgacactgtactccatttatgtaaaatacgtcattatatggggaagctgactgaagggtacacacacggtaactctctgattttctgcaacttcttgagaattcaaatttgagaaaaatgaagatcaggaacgtaagaagaaactgaagttatttagagctatgtcttgatgcttcttttctcatttctttcatacacacttcgcctaggagctttaaataccatatagatgctgacacacccaatttatatctcctgggtgtatctctcttctgagttccaaggtcatacctaattgcctgtttgacatcttctcttagtactatcacaggcatctcaaaagttttaaatccaagagtgagtttttaaaaaatttcagtagttttggggagtacaagtgatttttggttacatggataagttttagtggtgtttctaagattttaatgtactcgtcactgtacccaatatgttgcctgttatccctcacccccacaactctcccccacaacaggtccccaaagtccattatatcattcttatgcctttgtgtcctcatagcttagctaccacttatgagaaaatacaatgtttgattttccattgctgagttacttcacttagaataatgacctccagcatcatccaagttgcattcctttttatggctgagtagtattccatggtgtatatataccacatcttctttacccactcattggttgatgggcatttaggttggttccatatttttgcaattgcaaattgtgctgcaataaacgtgaatgtgcatatgtctttttaatatcatgacttatttttctttgggtaggtacccagtagtgggattactggatctaatggtagttctacttttagtttttcaaggattcctgtgagtgagtttttgagcaagttccctaaccccagatttcagctgcacgttgtacttattcaggttaagcctggaaatgatcccatctctaaccagcctctgctcccaacatccagtctaccaccaaacccaggcaattttaccctcaaagaaccgttggaaactcctaatgtatttttcttacagttttcattatggaaaatagtaagcatttacagaataaagataataccataatgaatccctgtgtagctatcacccagcctccaaaatattatattcaactcatgtccagttttattttctctcctctccatttcctccacttcagtgtattttgaagcctatctcaagtatcatattatttctgctgtaaatatttcaacatacttttctaaaaaatacaatattccttacttgaaaattataatttcttaatattatcaaatatctagtcatagtgcacatttgtatgattagcttatgatttttacagtatgttttttcaaatcaaacagtttcatacatagcaattggtggatatgtttcttatcctttttaatcatctcatttttttcttatttgtttattgaataaactaggtcatctatctgttagaatttccagccctctgcatctttatgatttcatctgtgtggctgacgtagagatgtaccacccagatcccacttcaggaaggtcttgttgcacagttgctgggaatgtgagcagcagacagattccctcttccagctttcagttccttcattatcttacttagtcatacggagcttctttgttttcttttttcttctttttttgagacggagtatcactctgttgcccaggctggagtgcagtggtgtgatctcagctcactgcaagctctgccttcccaggttcaagcgattctcctgcctcagcctcctgagtagctgggattacaggtggcaccaccatgcccagctaatttttgtatttttagtagagacagggtttcacagtgttggccgggctggtctcaaaatcctgacctcaggtgatccacccacctcggcctcccaaagtgctgggattacagacttgagccaccactcctggccagagcttctttgttttctagcatatcaaggtaattcaggatagtcttgtacatttctgccttaatcctagaattatctattttcttttaaggatttctaactccttataataggaaattatctttagggatcataatctggacacaaggagtgttctttattttctacgctgaaaacagtgatcagagccgggaaatttaaaaataggactacaagattatcacttaaacttatggaggctgagatgtgttaagttctgctgtctgcaagttggagacccaggaaagccagtggtatggtttgaaggcctgagagccagtgaactgatggtatagactctagtctgggtctgaaggcctcagaaccaagagtgctgaaggcaggagaagatcaatgttccagctcaagcaggcaggcagagagcaaattcaagcttcctccaccttttgttctattcagagcctgaatggattggatcatgcccacccatgttagagggggcatctgccttacttagtccaccatctaaatgctaatctcttctggaaacaccctcacagagatcacaagaaataatgtttaaccagctatctgggtaacctgtggcctagtcaagttgacacataaaattaagcatcacagtatggtctttaaatcagcaatggcttcacctgggagcttgttagaaactcagattttcagacccaccttcagacctattgaatcagaatttgaatttcaataagtttgagaagcactgctttaatttaacccattttattctttctcacacacgtgtagaatttttcatccgtattcattctttgacaccttttctccttctgtcatgatagcaaacattgattgtgccaacagatcaatgtgcaattgtgccaatttgcacagacactgcgtagagtgcttttgaaattatttaatactcaaagaccctttaaagaagatctgattattatctccatttttcaggagaaggaacagaggcttaggatagtcaagtaacctgcccaagttacacagcagtggtaaatccaggactgaaaaatagctggtccgattcatacattgtgtttaactactttgccatattaactccctgggatctttctaatccttcaatatttccataaaattctgtcttcttcagcccctttgctgaactcttgcagttattccattgcttctcagaagttgataaattatcctgtcttcattaatgagtcaattgttctttctctaataccccacacttgatcattaaggaatgctatgtctgaccttcaaaatattcctcgagtgtgagcactgctcattgtttagtccactgccacccagttaaagcaccattgtctcttgcctggaacataacatactcctctaattgcctcccgttcttgcttgtctacagtgtgtcaagaacagccatggtggtctcctgttcaaaatctttcaatggcttctaactgcgcttctagtgaaatccaaactaattaccaaggcttataaggctctgtattacaggtcagaaaacaatggactaagggcccaatatggcctgccactgatttgaaaaataaagctttactgtaacccagccatatccatttgtttacatatgatttgtggctggcttttcctttactatggtggcattgagtagttgtgactgagactgtggggcccacaaagcctaaaatatttcctatctaaccctttacagagaaaatttattaatccacattttagatggtctggccctgcctacctttcggacttcatctcctagctctctcccttgtgtgccctctgccctggccacaaagcctccttgctcttccttgaacatgccaagcttgcttctgccacaggatttcaacacaaaatatttactttgcctagaatgtttttatctctaagatccacatatctccctccctagcttcatccaagttctgctcaaatgtcacttcagcatggccttccctgaccaccctccctaacatccccccacccctattccatcaccttccactccttgccctgctttattcttcacggcttttatcaccatcctgcatccatctgtttgtctgtttgttaatttattgtctctcttcttccactaaaacctaagctccatggaatcaaggatcttaattgtttggttctctcttgtatctctagcagtcttagaccacataggtgcttagtttatttgttaaacaaactaacttcctaactagctattatgtgtggcaggtgctgtgctagatactaggtatacagaggtgaactcttgtttatggctctccagggcccacatgggacctggacgtggttctggaaagtgatcatcttgagcttcgtgtggcaattcctcaaagacctagaaccagaaataccatttggcctagcaatcccattactgtgtacatacccaaaggaatataaatcattctgttataaagctacatgcacacgtatgttcattgcagcactattcacaatagcaaagactcggaatcaactcaaatgctcatcaatgatagactggataaagaaaatgtggtacatatacaccatggaatactatgcagccatgaaaaggaacaagatcatgtcctttttggggacttggatggagctggaagccattatcctcagcaaactaatgcaggaacagaaaccaaacactgcatgttcttataagtgggagctgaacaatgagaacacatggacacagggaggggaacaacacacactggggcctgttgggttcggggcgtgagcagggggagggtaagcatcaggataaatagctaatgcatgcggggcttaatacctaagtgatgggttcataggtgcagcaaagcaccatggcacacgtttacctgtgtaacaaacctgcacatcctgcacatgtatcccggaacttaagaaaaaaagagatactgcaaaagtcatcaggagccagcacacctgccaggtgaaaccaggtgttctaaggcagggcatctatatttttggatttcagagaattaggtttttttctctgcattttcttcttactactggagaatgacataaggctgccaacttaattattttgtcatattggatatttcaagtaataaatctgctgtctgcaaaaagacaccttcaagataggtgaaaacatttaaatatgaactggatattagataatgcaatggaattattaatacttagtgtgacaatggaaatatgattatatctgaaaatgtcagttttgcttagagatgtatattggagtacacagggatgaaatggcatgaagcgtgggattggctttcaaataactgggcacagcaatgaagtgtggaaggtagtagtgttaccccattttacagaaaaggagagggaatctttttttttttttttttttaattttatttttatttttttatttttttattttttattttttttttttattgatcattcttgggtgtttctcgcagagggggatttggcagggtcataggacaatagtggagggaaggtcagcagataaacaagtgaacaaaggtctctggttttcctaggcagaggaccctgcggccttccgcagtgtttgtgtccctgggtacttgagattagggagtggtgatgactcttaacgagcatgctgccttcaagcatctgtttaacaaagcacatcttgcaccgcccttaatccatttaaccctgagtggacacagcacatgtttcagagagcacagggttggggataaggtcacagatcaacaggatcccaaggcagaagaatttttcttagtacagaacaaaatgaaaagtctcccatgtctacttctatccacacagacccggcaaccatctgatttctcaattttttccccacccttcccgcctttctattccacaaaaccgccattgtcatcatggcccatccccaatgagccgctgggcacacctcccagacggggtcgtggccgggcagaggggctcctcacttcccagtaggggcggccgggcagaagcgcccctcacctcccggatggggcggctggccgggcggggggctgaccccccgaccatcctcccggacggggcggctggccaggcagaggggctcctcacttcccagtaggggcggccgggcagaggcgcccctcacctcccggacggggcggccagccgggcggggggctgacccccccacctccctcccggacagggcggctggccgggcagaggggctcctcacttcccagtaggggcggccgggcagaggcgcccctcacctcccggacggggcggctggccaggcggggggctgatccccccacctccctcccggacggggcggctggtcgggcggggggctgaccccccccacctccctcccggacagggcggctagccgggcggggggctgacccccccacctccctcccggatggggcggctggccaggcggggggctgaccccccacctcgagagggaatcttttgatgaacttgccactcatcaagattacacaactagtaagaggtggagctaagagttgaactcagacaatatgaacctaaaaaccagtgttactaaatgagtcactccaatgaagaactttaactggaaatttggtgtcctacggagaggccgtagcatgcaaagatgccagctgtcctcattgatacttctacctacccttccatctgtgctcctgcctccattcccaccctcagataaggaaactcaggacctctagacatgtcaagaacatacttgagttgagagacagctctccatatagacagctctccatatagacaccaaagtttgtagccagatttttttttttcatttttttaatctttcatctccatggtgttcaatgaacccggaacataaacagacagatggtctgagtgggcgggcattttcacttaatgctaacacagttgccatcaatcccacctcttaaactaataccacctccctcttaaattaatgacgtcacaggtatgcagctccctgcagaccttggcaatcacatgggaatctttttggcacttctgagagataagatctatggaaaaaagtctcagaatctgcaaatcttttccagagaaaccttatcctgttaagaactcttggactgatagtctcttgataactgacagtgaaataacactaataataacaactaaaatgtaccgtgcatttattagtatcaggtaccatgctgagtacaaggattttcactccattctcatcaccactctgcttagtgagtaccttgtggctgttttggaggtgggaaaacttataaccagctaacgtttttacttatgaattctcttacctcaaatatttacgaagcatcttccatacttaaggcacattatgtacaacttattacagactttcaaggagcttttagccttaaaaatgggagaaattaacagcaacaataacacttacggagtttttaccatgtgtcagatgctgcgcctttcgatctttggttgtttaatgatttcaacagtctctgatatggattctcttttctgccccatattttagaaacagggaaactggagcatagataggttaagtgacatgcctcaagtcacacatgtactaaacggttagagctcagatttgaaccccagaagcctgtctgttgacctgcatgcctagccaccatgccatactggtcttccttatttaaaatgtacacatccccccacccatccccccaccaacacacactaaaaataaccagtaatgtgaaatcagcttagaataaattctattcacttttttttttttttttttttttgagatggagtctccctctgtcacccaggctggagtgcagtggcgcgatctcggctcactgcaagctccgcctcccgggttcacgccattctcctgcctcagcctcccgagtagctgggactacaggcgcccgccaccgcaccaggctaattttttgtatttttagtagagacggggtttcaccgtgttagccaggatggtctcgatctcctgacctcgtgatccgcccaccttggcctccctatttacttttttctacattcaatgagagcgtcaacatctctaggcaagaagtctcattcatatttctgtccccaggaccccagaccagtgactcagtgggtagtggtgttgattttgtaccccagggaacatttggtaatgtctgcagacctttctagttgccacaacgtggggcggggtgtgctactggcttctagtgggtaataacaaggatgctgctacccctgcagaacacacaagagagtccctgacatcagagaattccccagccccaaatcggtgatgccaaggctgagaccctgcctgagtataatgactaacaaagttaagtgttcaatatatagttttttgggtaaatttcaagtcgtataccaacaacctccaccaaacgacaatccctaaaagataacgtttgcttatctttcaaaacccagctcaagcagcaccacctcctagaagcctttctgacaccatcagacagcattttttttttctttttaaaaatcctagtaaaatattggcttattttactttctcttcacccttttcctagtcagctctgctcagggaatgcaaatgtcagcctaaggatgacactattaggccaaaagtatgtttcttcaaaagcaatgtgaaacatttcaaagttaaaaaaaaaaaaaaaaaaggaaaaacctgtgaattttccatggctttgtagctgggatttaaatcctaagtttccagtcacaagcaattatccagcttttaatgaaatgcaagccttctatctagttgctaaatctcctgagatggtttctggtttcttcagttctcagtagaaattcttttttttttttatagacaggtttattgaggtacaatttacatacagtaaaattcactcttgttaagtggatagttctatttgttttgacaaatgtacagtggtgtaaacatcacaaaaacaaactaagcacacacaaagtgttaatagtaaatgttttacattttaccacatttatttatttgtttgtttgtttatttatttgagacggagtcttgctgtatcacccaggctggagtgcgatggtgcaatctcggcccactgcaacctccacctcccaggttcaagtgattctcctgcctcagcctcccgagtagctgggattacaggttcataccaccaggcccggctaatttttgtttttttagtagagacgatgtttcaccatgttggccagcctggtctcaaactcctgacctcaagcgatctgtttgccccggcctctcaaagtgctgagattacaggcgtgagccactgtgcctggcctaatttttatttttatttttttttttcaagaagcctgtcttgcttttgtaagtattttctatctggtctatcaagacataatttacatataataaaatttaccctttgcagttctgagagttttgataagtgtatacaatcatataatcactaccaccttcatgatgaagaacatttctatcacctctaaacattttctcatacccaggtgcagttaagccccttccctcttcacacgaggggaagaggcaagggccctgagaacacctgagagcacctgacgggtgggtttctgagctggtacttttgctttttccagaatgttatagaaatggaatcatataacggtgtgtggtatttcatgcctaacttcttttgcttcacgtaatgcctctgagtttcatctatgttgttggaggtatccatagtttgttctttttattgctttttattccattgtatggatgtagcacagcttctttaattcatgagtcgataggtatttggtttgcttccagtttttggagatgatggagattatgaataaatctgctctaagtatttgcatacatggtttcattgggacataaatttttgtttttcctggataataggagtgagattgttgggtctatggtaagtacatctttaacttttataagaagctaccaaactgttttccaaagtgcttgtgctgtttcaccatcccattagcaatggatgacagtcccagccacttcacctctctgccaccacttaaaattgtcagtggtggccagacatagtgactcatgctggtaatctcagcactttgggaggctgagacgggaggatcacttgagtccaggagttcaagaccagcctggacagtacagtgagaccttgtctgtacaaaaaaaaaaaaaaaaaattagccgggcatggtggtgcatgcctatagtctcagctactcaggaggctgaggtgagaggatcatttgagcctgggaggaggacactgccatgagccaagactgtaccactgcactccagcctgagcaacagagcaagaccttatctcaaaaaaaaaaaaaaaattgccattttcatttccctgatgactaatgatgtcaagcatttttaatgtgcttatttgccatccatatatcttcagtggttatgcgcttattgaaatcttttgctcacgttttaatttggctgttttctgtgagttttgagagttctcgatatattttagatacaagcccattattagatttgtaatttgcaaatattttctcctagctgtggcttgtcttttcattctcttaacattctttcaaagagcagaagcctataattttgatgaagtccaagttatcaattttttcttttataatttgtactttttgtgttttacataagaaataattgtctagtaccaggtcataaagattttttttctcctaagttcccttttagcagttttgtttttttttagattttacatttagagctatgattcatgttgagttttgtgcatagtttgaggtataagtcaaggtctcttatttttgtatatgatgaccgactgttccaacagaatttgttaaaaagacaattgtaagttgcagggcccgctcaaaccgagtaaccattgcttaagttgttttggatagcacagggccaaaattgcaagtcatatagcccagacatgccaatgaaaaacagctttaacctcttagtatcaccagccaggcaggctggctgcattggcagcacctgggactagttaggaacgtcatagagcttgacccacctccagatcagggagacaaatttcagcgttgcctctacctccttgccagtcaacttgcagtgaagctttttcttgtctcaaaagctggtgccataataggggcttctctgcacgccaggtatgaattgactgctcaataacataatcattattcattaaattacctttgcaccattatcaaaagttaactgacaatatgtatgcagatttatttttattctgtattctgtttatggcagctttgtatctactttcttgagcaaacacatgtaccaaacacagttaacagcactttacaaataataactcatttagtactcattacaaccctcatggcatctgcttctaatggttctattttcttggcaaggaacctgaggcacggagaggctaagtagatttcctagggtcacacagcctgtaattgatggcacttagcttctattttcttctctcattgtaaatcatcctttagtataattgtggatttggttgtctgaatttttcactagttggtaagctgtttgagggtagagattgcgtctttaagctttgtggcctaagcacttagctaatgccagccttggagaacatgctccatgaaggtgtataaatgaacgaatgaatgaatgggcaaatgcacaaagtatggacgaaatgagtgctctgaaggttgtgctctttggaacctctgccactggcatcatttcccaagtgaaaaaaaaaatggctgccaacaacgcagacaaaaagctaagtgaaaatgaatacaggatctgtctctaataaaaacagaaaaagaattatgcttagaaatattcatcactggtgcacgatgatccagatttcaacagatcaaccttgatatgctgataagagactatttgtggaaagactgaaccttggaggccacactgcagggctccaccggagatatgacaattgccaacatctgtatgggaattaagggatggagacatgaggttaattgccagggctttaagaggcaggagaggaggaggtggaagaattataagaatcatggtgctgttagtgggaacagccaaggctctggagttggcaaagaagattaagctgcgggtgacaggcaggtggagggaaacccagcacatcccactggctcaaggtgacctttctttcttttcttttccttttatgattaaaggacaatcatgcttgtggttacaactgtcaacagaaaaggagggtagaaattaaaaagtctccaaacttccttggttcccctgagagagttcataagattgactttgattccagacatttttctggatacatacagtgatctatcataaatatctaactagcaggcaaatttttgtgtttccctcacctcagggagtcctcttacttccaagtctttccaaagtttctcatattccagaaaacatattttctaattttatttttattttttgcacaacgaacagctctttgttgcttactttagctgcagattagaatcatctgaagatttttgttttatttataaatgatgactgcagaagcctcagtcccagagaatctgatagctttgtttttgggtatggcctagatattggcgtgttccccacatgattctactatgcagccagatggaagtacaactgattctcaagtcaagttgcaccagaattactttatttcccttaactatggttattagccaagcccctgattagagagtctgattcagtccttttggaatggggtcagggcagtggtatttttttttctctgttccccaggtgcagctatggttgactcactgctgcctgaagcttttgcaatccatgctaatgggagatgtgttggaggggaaccttatgcaatgtgtagaaaaggaggcaaagacgttgaacccagacctggtcattctcagcaggagttcacaattgcaatttgtggatgctgtaagcatctctgtgatggtcaggagtatctacctgcaagataaaggaaaaagaattttactaatgttacatgattggctacttgatgcaggatcttacctggaggaacatcattcatttaaataaaaatgaaaacaatctgctgtgaatcactgtgttcaatcagtgcttctcaaacatgaatgtgcacaggaatcatcaggggatcttgtaacgatgcaggttttgatttggtggatctgggttggggcctgagatgctgcctttctaataagctcctggggaattgtctcgggatgacaatttgagtggcagggtatcagttcactcaaaatgtggttctgatgtgagaagcttgaatatagttattttatgcagtaagagagtgaatcatatttcaaattgactttattctctatgtatgattttaaatggatgtatagctaacataagaaatgaacatagtgaaccattcaattgtacagtttatatataccatttggcccaaatgcttttttacttacttttaaaatcttttcattaagaataaagttttgctttgagggtgggatggttggtaattttgtattctggcacatatacaatcctttagggattagcgttcataaacatagatagttctctgaaagcattgaacaggtggtagaatgaagtaggaagccggtgactgagaaaaatctaggctggttagcagatgccttcgcttggaaaatagggataatattcatacctacctcataaagttgctgtagaaataaaatggggggatacatatgcaaagcatatagcatagtgtctgctccataaaagggactccataagctatgccagttttatcactatgttaccagtccttcaggaggttatgggatgcttagaagtgtatttggaccctttcaaaacaaaatagatgagtacatgtttttcttcattaacacctacgcatttataattttatgtaaattcatgcatactaacatgtcatgcatgcctttctttagtttagtctttttattttactttgttgcttgggtcctccatcctcacatatcagcggcccgcctatgttaacctgggttcatatctagtatgtacttttaacatttattattattttattattttttctagtgtatatttttaaaacaaaaaaccctacacaaatatgcaaagtataaaatttgccaagtttttacatgtatatacacctatgaatgaatcaccaaaatcaagaaaatggaattatttttcactccccaaagtttcctcatgcacctttgtaacgcctccctatcatcccttctcaccctcttacaggtcccaggaaacactgatctgctttctgtcaccaaagagcattttgcattttccaggattttataaaattttataaaatgactcatagtatgtaatgatttttgccaggcttatttcatttagcataattatgttgaaagctattcatgtcatgatcatggatttagatagacctttcttctttacatatataggcatttaatactataaattttcctctaaatattggtttagcaaaatcccacaaatgcattttgttgtgttttcattttcattcagttcaaaatattactttccattttgattttttttcctttggtgttattaaattttcaaatatttgtgaattttccagaaatcattttgatttctaatttaattccattatgatcagaaaagaatgttttgtatgaatgaaacccttttaaatttgttgagccttgttttgtagctcagaatatgtctaccatggtaagttttcaatgtgtactctgttgttgttggatgcagtgttttaaaaaaaacatcagttagatcaagttggttgattgtcttcaaatcttctgtattctcactgattttctatatacttgttctagcaatcattgagaaggatattgatatctttgactaattgtagatttcaattttctgataatttttatcagttattacttcatgtattttgaagctctgatattgggtatacaaatatttagaattgttatgtcctttagatgaactggcccttttatcataatgaaatgatcttctttattcttagtagtattctttactctgatttagctatttcaactttcttttcacttgtgttagcatggtatgtttttttctatcctttttaatgtatttgtgtcattatgtttaaagtacatttcttgtagggggcatatatttgagtgttgacttttaaatctaatgtaacaatctgctttttaattggactatttagactgattgcatttaatgtgattattgatgtgattaagttaaatctattatcttgctatttgctttccattgtaccatctattccttgttcccttttgctttttccctgccttcttttggattaattgtatattttatatactttcacttgtcttctttattgtttcattgaccatgatattttttgttattttagtggtcattttagagtttacaattcacatttttcacttatcacagtgtactttcaggtgatgaagtatactttacatgtagtgtgagatctttacaatagtctacttctatttctccccacctgacttttatgatattgttatcatgcatgtaatgtatacatatattataaaaactagagatatatacacaaacacacacatatagtgtgtagagctatatatgcttataaataatgtttataaaatataatgaaatatataaatataaaatattgcattatttttgtttaaattataaatattttatgcttagtaatttttattttattgcatgccagatattgtgcaatatctctttttgggtagtgaatatttttgttttcaacaaaaattctcaagctttgttctaggacacagttatttatactagttaccctttatctgcagttttgccttttatggtttcagttatctacagtacagtacagtgatctctttgtatctgtgggggattggatccaggacccccaaaagataacaaaacccatggatgctcaagtctcccatataacttggcctagtatttgcatataacttatgtacatcttcctttataccttatctctagattacttataatacatagtataatgtaaatgcaatgtaaaggttgttatatgatattgtttttccatttgtattttttattgttgcttttcatttttttaaatttattttttgcatattttaaatttgcagttcactgaatctgtgtatatggaacctgtagctacagaggtctgactgtacaagaaattttgagagaaggggagagagagtgtattcacataacttttattacagtgtattgttctattttattattagttattgttgttaagctcttactgtacctaatttataaattaaattttatcactggcatatatttatagaaaaaaattctatatagagttttataccatccccagtttcaggcatccactgggggtcttagaacatattctttgcaggtgggagaattcctgtcctggaaagcagtaggattcctgcagatttcgcttttcagatctgttagcctggagaagttatccgttttgggctcattctttcccatttctgagacaagaccctctgtgcactctatcgcacgccccatgaatcatgaggtttcccatttttttctggtggcaatagagactattccccagccccgcatgagtgctgagaacagtaatctttaatgttcttagatgattttctctttggcctcaggtagtttcctaacatgtgtgaactgatttttttttttaataaatgaatatttgagggaaaccctcagcaggtcttccaagttctttttctgtgcatctttctcttctgagaaagctactgtgtcctctgagctttagccaccttggtctccccaagtatccttaactcagggagtctgcctggctcccgtaggcgcctcaggtaccagggcctggccagtctctcaaggcagttagctagaactatagtgtgcctcaccttgcttgttttccatctctcaggaccattgtcttttgttgtcttatatccattatcttgaaaagtattgtttcatatattatgtcctacattattatttttttggttgttttgggcaggaatgtaaatttagttcctggtactctatcttgattggaagtagaattacagttccttcatgctcatgtctacatcctcgtataactacatacattcatgtatacacacatgcacacatatataaatgaacatttaattatctcattctactaaaatggaattgtatacacatattgcatcttaattttcttacccatagatgccttgaaccctgtcctccacatcaatgggtataattataattcaatcactttaatgtccatataatattttgtaatatggatgtgacataattttaaaaaaccatctacttatggacacttcctttgtttctaatatttgacacttttaacaatgtagtaatgcctctctccttctctctctctctctctatatatatatatttaaaccatagcatcttaattcaacctaaaccagaaataagattggtaaacaactattttgacatgaagatactgtttttatttttttaaacaaaattttttagatcataattgtagtgatcatgatgatgataagcatgtatagaacctatgtccaagtgctttgcatgtattaactaatctaatgctaaccaacacctttgaaattctataaggtattatcactattttacaaaaaagaaactgagtcagtaaaaggttaaaccaactgcccaaagtcagacagccagtaagtaggggaggtgggttttgaagccaatctagctgcagactttgaagcatagtagcattttcatgttgttgtctgaactgtaagttgtttgattttacttaataatataccttggacatgttttcatattagcacttacagattatctcattctatcttttagctgtatttgaatataccagaatttatttccctagtcttttattgttggacattaaattgtttacagtgttctgcttttatacacaattttgcaatcaacatccctgaatatatatatgttagtttatccttgggaatttgtgtatctgatgaataaatttctagcaatagtttattcatcaaagagtatgtgcctgtatatttttagcaggtgctcaccgccttctcactcacacagatgaaatctattaagtttataaatgtaaactttcaataacagtgtgactatgggacagtgatatttaagggatattttaaagggtggtgtagacatgattcacatgttatttcacaatgacatgtcattgttttccttcttcttttcagcttcttctctttcatatttcagtatgaaatagaaaatccaacaaccctgtttccattgaaaattgccaaataaatcatcagatctttctttttagaggcgttgccttcactatctggatgtaataattataacaactgggaacctgattcgggctgttggcttctcccgacatgttcagtcataatggggaaactaagaacattttctatttccttccagcatacagcagtattaagaatcctaggaaactgacaacttcccacttctatagcatctgaaatacaacccaaaagaaactgagctcagatgtggcctcagggttggacatttgaaatggcaatgcatgggtcttggctcacagctctcagaatcccagctttgtatgtgtttcccttggacaatgtatgtgcttagtagatgaggaggaaaccgcatgcttctctccagctcggcggagaaaaatatttcttctctttttccttctaatgatttcattagtcatattgtttacattttactgaaaaaaattatatcccccctttaaaatacttgagcattgggcagttcatgtaaataataaatctgcctaagtttacaaattcttgactagaaataataaacctgggcgataatagtaaccatagaattgaacagcttttcccagaggggcactcagtggggaaatttggtaattatagttagcaaatggccctttggcaacagaatgtcttttttaaaagctcaacaaaaataattctggggaaaataaaaaggcataatctgtgaaatgctgaatgtaaactataccgcatgacctaattaagaggactgctatggaggatttttccaaaatactcaataaaatgagccttattatggcagtttgggggaaagtaagcctatttgtttcggaggtgcaaatgccagataatataatattaaaagaagatagattcaaaagcaaaagagattactgtgaagagcagataaatgaagtgtaagcacatttagtgttaaagacaatttttttttcactgctacaatatctggtactgcagacacatggaaatttaaaggtttttcccccacagtggaaacgttatgcttagattgcatgttgctcatctaatatccttgatatgagctttaataatattgaaagacttgctattcagctgcctaacagttctaaagtggatatctggcctagccaccagattgaagaatgtgaaagagcttattcagccacgttaatgaacaaagtcaatgactactccgttacttcctgtcagttcactcatccctccatccctcctcctgtctacgttttcattaaaatgttgattgaatattccctacgtctctggcactgctcaaagtgctggagctacagcagggaacaaaataaacaaggttctgttcatatggaacttacattttagtggatgttgggttggagaaatatgacaaataaagataaataagaacataatttatcaggtaagagtagatgataattaggaagataaagcctgtgaaagaaataaagcatgatggaggggtgtgtgtgtatgtgtgcgcgcgcatgcatgtgtgctactttaacaggagcaagaacaaagttaaggaataaagaaaaaaccttaaggctatcttggaggaagatcactggagatggtgcacaggccctgaggtgggaatggcttgggatatccaagagtaacaaggaggccagctggactgatgcatagttttcaaggagtagagccataggaattatgagcagagacatgtctacaagcatgattatgtacttggggccttacaggcaatggttgggcagccaatagagagttttgagtattttagtggcttgatctgatttatgttttaaaatacatttggccatccatatctgtgcattccacacccatggattctgccaagagaggactgaaaaatattccaggaaaaaaattccacaagttccaaaaagtgaaacttgaacttgtcacaagggtaaagtattgtgcaggtcttgtgttaggtattataagtaatttaaaggatatgggaggatgtgtgtaggttatatgcaaatgctatgccattttatataagggacttgagcatcttgggattttggtatatgccaggatgtggggattggaaccaatctctcatcaataatgaggaacaactatactccctctggcacttattggagtgacggtgatattctataccttgattgccatggtagttacacaactgtgtgtgtttgtcaaaacttatagaaatgtacacctggaagggtaaattttactggagataaattatagctcaataagcctgaattttaaaacgttctttatatctgctgtgtagatgatacaggggccagaatgaataaagacagactaattaggaggctatagcaaaaaatcaggcgaaatacaatgatagttttaactaggttggtagcagagattttggtgagaaatatcacggtttagggtaattttaaaaaatacaaccactgaaacttagtgataagtataaattcttctcttacttcccactcgtccaaatctcagcaaatgctgccaccacaaaccagttaactcaagccgtaatccaacgaacatctttgattaatgcatcagtcaattctgtaggctcttcttccaaaacatggcttgaattcttccatttttatttatgctaaccataccttgatagcatctctatctttggaagatgggatagcaaatcccatcatttcttgctaaaacaattgcagtatcttagtatcttgtctttgaatttattctcctaatccattgaaatatattctcagtatggaagttcaaagtaatcattttgaaacttttatgtaacaaatctttattgagtacctactatttgcttgggtaatttagaacctggagggaataaaacagaccaaaatctattgaacatgagcctgtttaagtgggtttatgaattaaaatgccaggttaacccttataaaatgagcaagtggcttagatatattcctgcaaacaggccgggcgtggtggctcacccctgtaatcccagcactttgggaggtcaagacgggtgaatcacttgaggtcaggagtttgagaccagcctggccaacatggtgaaaccctgcctctaccaaaaatacaaaaattagccaggcatggtcgtgtgcacctgtagtccagctacatgggaggctgagccaggagaatcacttgaacccaggaggcggaggttgtagtgagccgagattgcaccactgcactacagcctgggtgacagaatgagaccctgtttaaaaaaaaaaaaattcctccaaacaaactatggattgaagaaaacaccaatgaaagcacagaagtatttcatcaaaaattatccataactggtcagagagaccaaaagttaagtttcattaagtgtgatcagtaatgccctttttatgtttggaactgtttcacacattacagacattaaaacaggaagtgaaataaataactcagactgagaccttggaatagctttatcataaaatatgaaaccacaagcttcaaaaaaaatgaaagcatatttattcgaactttgcttttaccaaaaatgatttatcttccatctcatctttttataatttatttgtgagtattttataaaatatagaatgttagtataataaaacatacaatttataaattaaaaaacagccttgaattggggatggacatttgaaattttcttattaatggaatgtacaatcaaaaatgtttgtagactacaaatttaaatacttggtattacacaaatgtaatatcacttttcaaagtgtttattttttaaaaataaaacatctttttttaatccctttgaatttttacatttagaaaccatccattgcctctaccagagagctgggacgatgtggtttgcatgttgagatcaagaatccaggagaaccagccaaggtgtctgcagaatctaccagctctaaattgttggaaatgctggtggaattgaaatccccttagtgagatgcagcaactttcatctgagacatatgctgtaattagcagtttcttaattaccgagtgcttgaagtatgtcatactgggaaggggtggcgggaaaatgctgctgcgcttgaagacacaaggtgaccacgttctctcaaccagcttgagaccccaggttcactcttactgcagcacaaacacactgtggccaagagaagaccattcaaaggtaccccactgcttcctatttagagggggaaaaaggacgtcatatatccctgctcatgatggcataatttggtgttaaagtcagttgtgatggcaaagtaaagttttggtttgtttggtgagaaaactgagttcaccctcttgccaccctcttatctgtttgagccagaaacgatcccatctaccaagtgctgtctgagagccagggtccatgcccaacaattttcatgcatcgatacctttcatctcatgaagcgggcactactctgatatgcctttgctaggtaaggaagctgaaattcaaggagattttgttccttgttagtgacaacatcaaggcaaagtggctctagagcctgcctgcttagtcacaactgtgccttgtcactctactgctttgaaccaggcagctattgtgccggtggcatatatacaaggaggctgagggacagagcaaatattcaggacaagagtgagtcatgctgagggattgtggcaagaagaaggctggctgtgggtaggggagggccttgggcctggggagaacagaaattctattgaatttctaactaagtgctgggcagagtagctcttcttccttacctccttatgaaatcatcagtcaaatacactcatttcttgttaaagcattgcgagttgcatccctttgcagagatgtgtttaactcttgagccacgcttccaattgggcttggggcagaaaaggaaagtccccagatgctgtcctgttatacctgcttggcttgttttagaacaagagtctttcaagtcctgggactaatttattggcttcggttacaggggagctgcagcttaggctgcctggcttttgtaggaccacaaagaggaatctctgagatgctttgtttcttctagaataagatccagtactaaaggggaaacgtgcttctgtaacttggtcaaggtttacaaagagaaacaccctgtccctctctgcatgaatttccattggccttctatggaatttatggcttttgtaggaagggcaaaatctggcagtgggaggaaattcattagtggtatcactcttatggttaggattccatgaccttgaggcacataaatctggaaaatggcctcagtgggcatccagtgccctgataaatagacacaacactgtgagccaagatttgtagtctatggaatctccttttctatatgaggagatgtgcatcctgcatctcaggcacttatattatccagagctgcagaaacaaggttatcagtttattggttcacttacacaccttccttgcttcctttcagcttcctcacccagccttgcaatctcagctactaatgtcatccaagctaattttcagagccgggttggcagagttggcatgtaatggatggacattttgatcttggccagcacgtttctaagtaggaagtagtgtccatccattaggggtgtcaagagtttcatctctcaaaaacagccctttttgtggtaatggatagctgctctgacagcttcagaggactgaattaggatgtgtgttctgcagatatcaggaaaagaaacaggaataaaacacaattatactcaaacctataacttttgcccgccttgaatacatttagttgctcacccccaaggctggaggatacctaataaagagacattttctggttaactgacaatgttttccttttttttcttttttcttgtcttttccagcagaagtctcttgtttctgccaagaactctgaaaagttaaaaatatttatcctgcttgcaagctaacaacttagcctgctgtagtttcttagatgcaggcagaaaacatgcaactcctgggtcagagacaaaaggcttgtattactcaaggcacagcaggcagcatgatcattgtgtttgctgcaggtgccctctctccaagttccctgggagtgatgggaagcagcctgggtagatgctgcagcctcaggaggtttggagcacagctgagtttaagaaatcccaaacttgtaaagagggcagtctaacctttgcctagagagagacattatcttatagtggtcaggaaacaaacctgccctctgccccaagggagctactatctctatcttccaaggcctttcactatacaaacatccgaaaaatcgtctgaaacaaaagctactacagaatgtgcagaaatgtaggaaactcatagagaagtacctcctggtaattgcaggaaagaatttggcaaaactggttcactgatactacattacttacattttaaatatgaaatactggcagttattttcaactaaaggcaaatataaaaacactgtcattggctcaaataatagcaaacaaagagtagcatgggattttgcctaaagagtacaatctggaataatatattgtcattatatttaacatcccttcaattaaaataccaattaaaatatgatttatttcaagtaaatgtcctacttatttttaattacactatgctttgttagtcactgtatttatgttggaaacaagatcattaaagaattatttgtcttatacattgttaaataaggcaaagccccaactcacaattttctctaatttgagaagaagtgggagaaaagaaaacaatgggatattttatcgtctggaaagtggaggttcatctaagatatggctatttgcattgctcccatttttgtgaactgctgcttcatttttacaaaagaaaaagaaacattttatgaagagattaacaaaaggcaccacttcactctcttaccacttaagattcatctccatgccttttcctgtattggatattgtaattatgtgattctttcaagctgatcagcatagcatgcaagaagtgccagttctctcaaatatctctagaactatattcataaccatgattcttttcttgttttttaaattctttttttaatggctataaattaatctcagtaataattgttatttgagggttccatcgcatgtattgacgtagtcacatttccaaaatcttttaatacaaatttccgaaatgtacataacttactaaatcctgggcttattttaccaccatgctgtctcctttttcaaggataaatgcatagttccatgtgctcctttgaagcactgaccaaggagttttcttcctgtcctgaaatcatcaacaaatattcttccagcagtttttctccccttgatattttatttctctctgtggagattttaaagaaaagagggataaaaaaatctttggaagggtatgttgagattttctcttcaattatatttaagttgggatgtttgatgccaatacgacagctaaaatggcaactgacagtaatatttgttagggctaaatctactctgaatcaccataatatataaaactacaggacctcaagaagagcaaaccaccaagatgctgggcaaaaatccccaacacttgtgatagtttgctgagcatgatggtttccagtttcatccatgtccctacaaaggacatgaactcatcattttttatggctgcatagtattccatggtgtatatgtgccacattttcttaatccagtctatcattgttggacatttgggttggttccaagtctttgctgctgtgaatagtgctgcaacacatggacacaggaaggggaacatcacacactggggactgttgtggggtcaggggagggggagggatagcattaggagatatacctaatgctaaatgacgagttaatgggtgcagcccaccaacatggcacatgtatgcatatgtaacaaacctgcacgttgtgcacatgtaccgtaaaacttaaagtataataataataaaattaaaaaaaaagtccccaacactgggcttctggtctccctaacatttatcattcaagttaacaacttggaggctccccttctcatgccctcagttttgcttccacatattttttattcattgagcaatgtaattgagaattccaagctatgatgagcgaatcaccaaccatataaactcaagattgaattactaaaatgatcatcaccatcattaggctcctattgcatagaaaaatgataggcacatacttttaactatttttcaatagttctaattattttcttgagatagttctttttataaaaaagaaaagatggagattgtggattcagttgcttcaggactttaaaaaacctattaccttgtttttctaaaaaaaggtgtcactttttgcttttttcatcccacagtgattgtgcagagaactctaaaatgccactagcaagggtagtaggaattagacaagctgctcccccatggtaattgtcaaatcatcttacttatactaaagtaatgatatgtccatgtctactcatccagtctcgctgcctaggtggacaaccatccaggaagaaatagacccagaacataacaaccctctctcacaacttggaggcctggtgagtgatggcagctgatacagccatgcatcagcctagcacatcttgccacataagctggatgtgaaaacaacagcatcagaaaagacagtccagctcttgtgagtcattttcctgattgatctaatttaccttgaaggttaatgtattctaaactaattcagagattaataaccacttaaagatatatgaaagacatttcgctctctgtgagcagtgtgtcataacctcatttattgcctcttcaatgactttgggaattatttgatgagatttaaagggaaatttgattgtaggatatggagagtgacaggtgcaatacatacagggctttggaaattattcttgttaataataaaaacaagcatgtaatttgattttccataatgtgatcttcaaaagcaaatatttattttcaagctggaaatcatttttatctattgaatgagataattgaatatgctattttgctaaaaaggaaagattgcttttaacataaaaagtgacacacatgtttttattacactccatatatttaatcacaatgaacggccaattgctgagggagccttatgtgtggatatcttaaatagaggttcataaagaatgtttctgctacttgttttcaatcaactgaaatgtattcattagtagaatgtggttaaactcatttgagcatgcttaaagatggggtatccaacccaacaaatgggaaaatcatcccaacaaacctctttctcttccccttctagtgttttcctctcaaatttttatttactttattttttttgatctacttttctatttaactctacctccaatttccaagttcaaagtgatcactgataggtagtaaatgtgattgcactagcaggaaaagaagtgttatgatttataggtattggagtgatatggagtaaaaatgtggtatttctctcacctccgctttgagctatgatcatagttatttgaagagaacagttgaatttaggcttttgaacaaataatcacgatcatgatttttaccctcacctctacctcactatataggaggaatttactaagcaccttctctgccttatcttccttgttatgtatatcactcccatgagaaaggtgaccttattattcccaatatgcagaatggggagctgattttcttcctatttacctgcaattttgcctgaagtccaagaagtgctatgtaccctcatttttttcccctcaattcaaacaagtgagttgttcgagaatcattgatcgtatgggtatctctataagaagaagtctactgtatgtcctgggaggatactgcttaggctgtaaaacttttgattttgtgcctctacttatctaaagagggtagtgaagagattggaaaaaaactcatgggctgagactgggggtggcctgcaattccagtgcatgatgcaacaaagatgtgggagtttctcacatgtccttaagaagtaaggaagccagctgtgcacttttccactgatatcttcctgtgagggctgccgactagaaaaagaatctgtgggaagtggtaggtggcataagtgttgtgaaaagaccccacagacctttgcaaagcacccagacctgagagccattcaaatgctgccacacagagggcgttgacagccagtgaagagtagtaagagaagcagccaccacagagcggagcatggagactgtctatccagcaaggagacatttccctcttaatccttgtcctacatcccaacaacccaacaacccaacaacagaaacgttccagccaaggaggtgcataagaagctattcatgcccttctcaccactgcaagcacctttgcccacatgtctggcaagcactagggtaggtgaactaggtaggtgagacggcagtgagctatgattgtatcattgcaatcattgtacgacctgggtgatgaagcgagacaccatctttggaaaaaaaatttttttgaatttatgaaaaactattacgggatttggaaagagggtttcaaccactcagaagaaaatagtttatttatacccctcaaggagttgactccactataaatataaaatactatataaatttaaagattatttacctctcaactaaaatgtttattgggtataaaaaagtgccaggttgcatactgtctctttgatacaatatacaaaagaacatgtattcaatatattcaaattatgaaacatagcaataaaatgaacaactttgacctcaccacccaacttaagaaatatgctaattttattttttttgagacggagtctcgttctgttgcccaggcgggagtgcagtggctctatctcggctcactgcaagctccgcctcccagcttcacgccattttcctgcctcagcctcccgagtagctgggactacaggtgcccgccaccacgcccagctaattttttttgtatttttagtagagacggggtttcaccgtgttagccaggatggtctcgatcccctgacctcgtgatcctcctgtctcggcctcccaaagtgctgggattacaggtgtgagccaccgcgcccggctgaaatatggtatttttaaaaaaaaatttattttaagttctggggtacatgtgcaggatgtgcaggtttgttgcataggtaaacatgtgccatggtggtttgctgcacccatcaacccatcacctaggtattgagcccagcatgcattagctatttttcctaatgctctcccttcccccaccccaccccctgacaggccccagtgtgtgttattcacccacccatgtccatgtgttctcactgtttggctcccacttacaagtgagaacgtggtgtttggttttctgttcctgccttagtttgctgaggataatggcttctgcctccatctatgtccctgcaaaggacatgatctcattcctttttatggctgcatagtgttccatggtgtatatggaccacatttcctttacccagttgattgctgatgagcatttaggttgatttcatgtctttgctattgtgaatagtgctgtaatgaacatacgcatgcacgtatctttataatagaatgatttatatttctttgggtatatacccactaatgggattgctgggtcaaatggtatttctgattctagatctttgaggagcgaataggcaacctacagaatgggagaaaatttttgcaatctatccatctgacaaaggtctaatatccagaatctacaaggaaattaaacaaatttagaagaaaaatgaagcccattaaaaagtaggcaaaggacacgaacagatacttctcaaaagaagacattcatgcagccaacaaacatatgaagaaaagctcaatattactggtcattagagcaatgcaaatcaaaaccacaatgagataccatctcatgccagtgagaatggtgactactaaaaagtcaagaaacaactgatgctggtgaggttgtggagaaacaggaacactttttcattgttggtgggaatgtaagttagttcaacactgtttaatatgtattcttaatgatacaattattaagtttctgtgtgcctctctttgacctcactttctttgcctaattaatttataattatttcccattatctggagtactgtgcatgtcccctaccatctagctcattggctagcacagtgcaggtacacaaacgtttgatgaatatccttatgagggatgcagataacaatgatgaagaccatgacaataattgcctttatggagcatattccatgggccaggctctgtctttttctctgtttataatcaacacaaatattctgcaaggtattttataatattgctatgttacagctgaagacaccaaagcaatcacaagcatagtcgtttgctaaagccacacacagtcactaaatggccagaccagaattgaagccaactctttcaagtgacagagctttttctcttttcgttgtgctaacttaactcagtctcttacttctcagtgtctgttacaggatcaggcctggagtttgttatataattgatacctggagatgcctcggtggtctatggattggcacaattgtggcattgccttcccatgaattcaaggctattgctgtctttgaactgatataaactgtatttttaattggtaactagtaaaaaaggatttgaaggaaaagttccttcaggaagttaaacctggttatttatctgccacttttgttgtataaccatggaatgtacaatggcagttatgctaagtaagtgatttatctccacaagttattgattttctcatgagtcaagaagggtggaactgagcggagctatgagtgatttatggagaggtatcaataaaggataccaataagaaggtgtctccatagtcaggcccattttatgtttcctttttgccacattgaacccaaataaatgtcctaaatctatcacctgatgtgggtaccatgccccagccaactgtttagaagcgtaggtttaatcatcaacaagaaaaatttatcttgataagatcctttaaattgtacttgtcaccagaaaagtgttctttaaaaatgctacaaggtttcatatctcttctttcacaatgaattatgagctcaatttcttttaagcttgaacctttttaattggaaattcttgttgcaggatttttaacattggcagggtattctaatatcttgcttcatctccttgaatctttgttggttatctgtgtgtgtgtgtgtgtgtgtgtgtgtgtgtacctatatatgattatgttgattgtgtatgtatctatctgtctataactaaacaaataagagtgttaactgtgagaattttgtttttgtaacaataattagtttgctaaatggcttagttggggcgaatgacttaaggaaaaagaagtcccatcccatggaaactagatgcagttcatttatttgagggagatattttagtatgggttgggagtcccagccctgacatttattagtcatgtaacctcagacaaaacttgtcagccctgtctgttttcctaactataaaatgcaaagatggttcctcctagagagcttctacatcacattgactagcgccaatacaaggcttagtacagtgtttagccgatagtgactactcagtcatcaaggcacatagtgactacacaccaacaagacttgctgctcttgttttgtgtccctaggccacaccccgatgtagaagtcagcattctcgaaaaccttagttcaccaggtaagcccagctttacatcatgaattaactagtaaaaaggatattatgaaagagaccacaaaaattctcctgtggaacaaatgtctctggacaagagctagtaaataacaggcctaccaaccacatgactgagtttggagcagtttttctggtcccatttgagccttgaagtaattgcagttccctatgacagcttgaccacaacttggtgagagaccctgagctagaactacccagttaggctgctcttgaattcctaaccctcagaaacgatcaggagtaatatgtgcttgttttaagctgctgagttttggggtaatttgttttgtgacaagataccttattgtccattacaaactgcaccctatctttgctcttgacattcccagcccttttatactgcttgcttttttgggggcggggcaggtctggctctgttgtacaggctggagtgcagtggcacaatctcagctcactgcaacttccacttcccgggctcaagacatcctcccaccttagcctcccaagtagttgggactacaggtgtgcccccactacactcggccaatttttttgtattgttttgtagagatggggtttcaccatgttgcccaggctggtcttgaactcctgggctaaagtgatccacctgccttggcctctcaaagtgctgggattacatgtatgagccaccgagcccagccgcttactttcttaatatcctcctccctcccttccttccttccttttccccctttctttctctctctctttcttgttctgtagcagttggcactttctaactttttaaattcacttattatatttattgtctacatcctcctaaaatacacgttttataaaagtaaaggttttggcccatgatgttaactgttgtatcttcagtacctgtcaaatagggatttgataattgtttgttgaatgaacaaatgaataaacataagctcagataaatgaaactgtcttggtttaattgtcgtttagaggaaatttttatatttagtatatttgactgtttttgtcccagctcaggtctactctagacttggggcctttaaaaagattaagttcggagagctaagagataagattcctgcagtttgagggtctttttttttttttttttaaacctcattaaaaccttgattcttttttctatgcagttataaaccttagtaaatttgcctgctgggaaaagacagatgaaacaaatggccttctacttaaatggcttttacctgaatttaatttcatctatgtatagcctcagtataaagttgctttagaattctcttgataagaagcaatgcagaaaaaatgtgatcatcatagtggggggtgtcgggggggtagaactcagatagctttggccttcctttttttttttttcttgtttgggtccaagttttcatcttctctgcatttccaaacagatgctgaattctcgtttgtccctaatggacacatcaagtgtactctagtcgctgtgtctgctttgctgtgagtagtttgcaattcctatgattaaatatgcaattaagatttaaatacaataaagcacatgaaattttgcaattaggatgaggctgcactgctcatgacagatttaaatgtcagcgcctccagttggaattgaaagtgagattttgctctctccatttgaatttggaaaaccctccattacacattactaaccagaatcagttgagactgggagttggtatactgaaagtggttcctttcaggcttataatgcattgatcctaaataatttttggagagatgtgtaggctgccagtgtacaaatgatgcagtgcaagtgatattattttagtttgataatcaacgtgtcatagcttctctccccgcttggtacgttgcattgtaaatccgatactcacaggcaaagtccctgtgatccactatactgccttgagttgcggcaacgttattatgaaaaatacattcatttgtctatatggaagggatttaaaggttgctgcattcattttttaccgcagtctaagtacttaatcttatggacattgctcaacaagaaaatgatctcttcctctctacccccattagcaacattctttcagtctcaagaaatataaatattggggcatattaatgaaaatgacatctactgctgatatattaaaactcaaatgtgtgattaagtattctgttaattaactctttttgtcagaataattgtaaatgcgttctcatacttcagagcaatttgaactgccaggagaaggttagtagactgccctgagatagttggaaatcagacatcattagtttaattaaattccattaacataacaaaaacagtttcttcgattttttttttaaaggatcctaatagagagaccgtcatagttacagcagcagccaggagatactaaagttgctgttttttaacccacaacttctatcgcttcttcagagtatttgccggctctatcatcacccattgatgcaacagatatttattaagcctttgcaaggttttaggcattgctgtaagttctagggatagaacagtatcttagtccattcaggctattacaacaaaacagcatacattgggtggcttataagcaacagaaatgtatttctcatcattctggaggctgagacatctacatcaaggtgctaagcaaatctggtttctggtgaggacccatttccttgttcacagatggtgtcttccatgtgtcctctcatggtggaaggagaaaaagctcaggcctttgaaaaataaggatactaattccattcctaagggatctaccctcatgacctaatcatctcccaatgacctcactcctaatatcatcacattgggagttaacattttacaacatgaatttggcaggggcggcggggggtaatgacataaatatttagaccatagcaagcagtgagtagaatattcaaggtcactcctcacagagtgctattggtgttgggggccagactataaaataaacagacaaatatggatggtgatcaatgttatgaaggaagctgggtgcggtggctcacgcctgtaatcccagcactttgggaggctgatgcaggcagatcacctgaggtcgggagttcaagactagcccggccaatgtggtgaaaccctgtctctactaaaaatacaaaaactagccaggcatggtggcgcaagcctgtaattccagctacttgggaggctgaggtaggagaatcacttgaacccaggtgactgtaagctgagatcgcaccactgcaatgcagcctgggtgacggagcaagtctctgcctcaaaaaaaaaaaaaagttatgaaggaaaaaaattaggcgatgcgatcaagaagttatgggaggtatatggctaaacctgcaattgagtgatcaatactgactctgagaggtgacatttgtacgggatcccaatgacagagctgaatagagagattggcaggtgaaggattagctggggaaaaggccctgagttggggacaggattaaggtttaaggaagagaaagattaggccgaagactgaagtccattgaacaggggcaggtattggaagatgagggtggccagggagcaggagtcaggccatgtagactatggtgaagagtttatttttagggcaatgggaagctattatgaaggagagggatataatttgatctatattatttaaattgactttggtgctactgtttggggaatggatgtagaagaccaaaaggcaaagtgggaaaaccatttaggaagctaatgcattatcacaataataaatgatgcaggcaccaaatttggaaatggctgtctgcaagctgagcataatcatcacaccagatgtacctcatgatggcttgagacctccccacaactcgacccctattcccttttccagctttatttcccactacttcttactactgtagtcagtgtagtccacctgtccactgtatgcacttctatctcacacctgtgttcaggctattgggcctgcctgaaatatctcatctacgcattatctaggtcggggtcattcccacacttcagattggaatttggtactgctatctctataaagtcctgaaggaacaggttaacttctgaacctcaggtttgaatctggatcaatcaaactgcaaaccccttcaacaaaagccctgggatttttgttaaaattgtagatttctacagcttactcaatatttgccaacttaggtgtctgggtggggattaggaatctgtaaattaagtatcctgggtgatgtaggtatccacttaggctcgaaaacaactgatgtcatgtttcctgtccgttgtttttcagtattaattgcatctgtgattaaagtatttgcgtgggagaagtacattctttgtgtttagactgatctggatttgtatctctgctttgtacgttgcaggtagcagttgtatgctgtcagacaagctagtgtctctgagtagggattatgataccattccccagtattgttaagatgaaatgagatggtgtgtctgaagtaacttgcataatgcctggcactgaatttttgtccttgtaacaacaacgacaacaacaacaaaattagcatttattatgcaagtgctgggaatattctaggcattttttgtttgtttgtgtttttgagatggactttcgctcttgtctcccaggctggagtgcaatggcatgatctcagctcactgcaacctccgcctcccaggttcaagtgattctcctgcctcggcctcccgagtagctgggattacaggtacctgccaccatgcccggctatttttgtatttttagtagagacgatgtttcaccatgttggccaggctggtcttgaattcctgacctcaggtgatccacctgcctcggcctcccaaagtgtggggattacaagcgtgagccaccgcacctggcctaggcaacattttacttgctttttatgaagaaactcatttagttttcacatgaggtcaactctattgctatctcctttttatacttaaggaaacagaggcatacagaaggcaaataactagcccaaaagcacaaagccagtcaacaactgcaagtaaccacagtagctgtaaataactgtaagtaattgtaagtaacaataaataacaacccatgttcttggcttgtcatgctaccccacctcccactatggcagcaaagcagctggggcaggggcttcacaactgggagctttcaattacttgctatggcatttcatcaagatgggtgtgttatgataccatgtaactctagctataactcatgaatcattgtcttcctctccctccttatcatacccttgaggttctatcttccgatgttttcatcttccaaagaacttacatggaatctttataccaaaaggggtcaacaaatatttgttgaacaaaacgatatgaatgtacctaagacagagcacagtcccagagatggaaagactcccaataaatatgtcttgaataagtgagtgaaattcatcctctttacctctgtttactctggattttccttggagttatttcatctctgaccttggtatcctcatctatacaatcaatgagctggggcttgcattgaacccaccacctcttcctttaccgtcaacacatacacatacacactcacacaacacacatacacacagtaacgtgatctattctgtctccaaattttccacttactaaactcaagcatgtaaataccagcacccagcacgtgttttggagagtagcaggttgtatgacagttgatttttttaggaagacaccaagatagctttaattctctctctcacactgaatatatcttccaagaagaattcatttatgctgctgtgaagttctgaagtcctgcctaaaatatatcgcctctagcagatggcggctgctgcctctctataaagagaaatggaatgccgctgacgtacagatgtatttaatgggaaataataggcctgagatttccaacagcttgcatgtctcctttggttataaatgacagaaagctatcacaaataagcttgggcaaaaagaagcatttattacaaggattctgagatatcccacacaatctcaggagagggatgtggctaggcctcagggataactggattcagaaaatcatacaccataaccattattgtcttcttttttcctgctcctctctgtaaatctggcccattcacttgtgtcttctgttggtctcccctttgttggcatccctgggccttttctgtgtggtctctgggagctctccccaaatttacagcttcttttctgaaatgtgtgtccagcttctctttctcagtctagttctcagtttcccaaagaaggtgccttattgttccagtctgaatcaggagcccaccctggaccaatgggccagaaggtgggctgtggtgacactgctgttcctcgtacaatcatacagatggtttcaagaaaaaatagcttcagaaagaggcgagagcagcttgcagaaggaagccagggctgaagtataaccctggacaaatacaacagttatgtgtttactgaaatctaccaagatctcatttctattgccataagggtctgaagtcatagctaaaatgattgcttctggcagataagtgctgttgtcttatccataaagagaaataaaatgctgctgagctatagagcattcagtatgaaaggttaggactgaggtttcagatggctaggatgccaagaatccttcttcagccttcagagagtccttgtttcatgcaatacagagccatcttgaacagaaatttccaggatataacaaaaatacagagtactgattatttatctaacacatcttagttgttttattatttaaccttttcaaaaccctgctggagtatgtttcactatggtttccattatacagatgaggaaactgaggcttagagaggtgaagctgctcagagcagggagcagagggagataggactcaaacctcacatcccagaactttctggctggtgtcctgtgtgatggggatgccttttgcgatggctggggaagctttgggatgtctgggggccctacactgactccagccacggcagccttggggagaattcagaatccccctcattaaccccggtgggcctcacgaagatgatcaccgtctgtgtgtgccgtgatagaaagatgtttgagaagcactgctgtacttctgataagacttcacataatttctcttaatgtcaagctaatttcattacaacaaaaagaattttcaggtgctagagtttaaatatttaaatatgtaaatatgtgttgtatttttatattgatcatagttgtacatatttttgaggtacatgtgatattttgattcatgtatacaatgtgtaatgattaaatcagaggaattgggatattcatcatcttacagatttatctttttttttttgtattggaacaaattcatttttgtttgtttgtttgttttgggacagggtcaccgtttgtcacccaggctggagtgcatatcttactatagccttgacctcctgggctcaggtgatcctcctgcctcagcctcccaagtagctgggactacaggtgtgtgccactatacctggataatttttttattttttgttgagacagggtcttgctatgttgcccaggctggtcttgaactcctgggctcgagcaatcctcccacctcagcttcctaaaatgctgggattataggcgtgaaccactgcacccagtctatgttgggaaggaatattataacttgtctcctctagctattttgaaatatacaataaattattaactataatataatacagtatgatgtaataatatatagtattgtatcaatactatatatgattaactgtaattttcctactgtatcatcaaatacacaaacttattccatctgactgtacttttgtacccattaacaagtatgtaaatatttaaatgtagttttaaatatttaaatttggaaccacatttacacgctgctgtcacatcatcacaattagttatcatttctaaaggctttcctatgtgccagccactgagcaaagtgccaacaactacatttgcttttccattcttgccttctactcatccataacccattgcgctctaaccttcaccttccccctgtccctgagactgctctttcaggagcaagcctaacacagtagaaagcacctgggctttggcataacatccacgtagggtgaaggacagattcccctgttttctaagaaaagtaaatggctgctgggcaggcacagaacaacatttactctagagacagtgatgaggatagctcagaggacaaccaaaaggataaaaaagaagttaggctcttggagagaatgagtaggtcagggagaaaagttccaaataaaagttacaaccaacatgagaaaatacacctccaggaatgatggtcagaagttccataaaatggtagaactcacaagtgaggaagtggaaataatgactcaggaaacatgtttacgaccatcaaagaaataaaggagtgaatcactttcttgaaatgagaagaggagtggcaggcattggtccactgcccacccaccccttttcctttttcattgcgaatacagctccatttattttctctatgcctagtattggggaattcattaagccttggaaatcctgttcccttttgtctgtggttggttgagatgtcatgtaacacaagcctgggcatgaaaggtaaggggcttttgaaaaaaggagaagttcctgaaataagaaaaaagaaatgtgagaagagttgaatcgttgtcctcttctgtactccactttgaacttggtcacaggagtttttgaagcctagagttgaggaagcatcttttgtgtataaagaaacaaatgtaaggctgaaaatccaaaatgctaaagatggcagaggaaagaagggagagattctgggagcttgaagatatttttggttcaccttctctcacaaacaaagactacaactacctagctacaaacttgttgttgtttgaatagatgatagatggagaggaggaatggaaagctggatgtctttgcttacttaggaaacggttgggtatttgctgtttggcaaaagaattgcaactaaaacaagtgggttattaagaagagtcagatattttaaagatgaaaaataccaaaaaaagaaaaataaagccattgaaacaaaaataaaaatgtgtaatgtaaaattcaaatgtggttaaaaagcacaatgtggaattatattagtgccttataaataactttcaaataaaataattatgaatagtttggcacatatgtctttttcttcttttctatctatcattattgacttttaatttcttataagcattgttacatactattcataatgttttgcagattcctttttcaattgtctttgtataaactgtcaatcttgcttaatctttttaacgactatgtgatattctatagcacagagcaagttaatacatccttcagggatggcaactggcagtagctgaactgaaaactaaaaatgtcaaatatttgcatccctagcaattatcctataaaatatcccccaaataatgcaaaaatgtatgtagcctagaatatttattgtggctttgtgtgtactaaaacaacaacaatagaaacagatgataaatcccaaatatgactctattttagttcttgatcacatcttttgattctgtgttagcattttccagaatgcaacatgcaagggcctactttctgtcgtaatattctccagaatgcaatagataccaatagtaaattattaatattgcctacttttaaactttttttttaacaagcattctgctctggtggctgctgaatattgttgtcacttcagtgactaattgctttcaccaaaagagtgatgtggagtacagaatcacctacacatcactgtttttgtattctgtggttattaatggactaatggactataaggttttaatgaatagaacataaatgcagagacaggaaaatatattagttttttttcccaagagtgatatgccttaattacacttaactcctcaggttattagctacataactaccggtggaagaacttataatcactctcgcgtgaaactaatgaatatgcttttacacattgaatatcattttatcatttactttagacacaaaaaaagactggcttttctgtgaacatgatgataatatcatgtcatttattcaaatattagagaacctgtcacatttgttccataaatacttattgtgtgtttattatgtgccaggcactattctaggttgctggggttacagcagtgaacagaaaaatccgttttgggatagggaactgttcctactctcataggaagtaaatgaaatttctatgtggattgccctagttgaaacttagggggaaaattttgatgtatgtcattaaggtggacatgactagatggcttatactttgattgaaacaagccttcttttacaaataattgataacaatcagttgcaaaatcaaaattcacaatggttatttgactactgaatttgaaatttagaaacatttctatagtaataagctagtattttaaacttcagatggagaatttgtagtgggataatatgaaaatttatttaaaatatacttgttatccattatcttttgctgcataaacaaacctgcccaaaatcttttggcttaaaacatcattttttccaactcactcttcagtgggctagcaaactagggctgggcttagctggaatggttcttctctgttccacacagtgttggcttgactctttcaggcatttgcattccgttagcaggtcacctgggtctgcgtgctctcacgtgacctcattcacgtctggcagttggctggggcttctccattctcatctatattgtctctactagagtttctcttgcacgtgttcacacagcaataacattggaaagctgagaccagaacctgtggggcttctcgggggcctaggctcgaagttagattgtcatatcctctccgttcaagagaatggagaatagatgccacatttctctctctctctttctttttttctttaggcttcaaatgagtcctttaatttgtatatcaaagtcattttttcgtgtagtatatgaatgtttaataattacactctaatttacttgccttgtttactgataggcgtttccacatttgcatttctgacataacttcttaaaaaattttacttcaataggtttttagggagcaggtggtgtttggttacatgaataaattctttaatggtgatttctgagatgtcggtgcacacatcactcgacagtgtgtactttaccccaatgtgtagtcttttatccctcaccacctcccaccctttcccccaagtccccacagttcattttatcattcttatgcctttgcatcttcatagcttagctcccacttaggagtgagaacctgtaatgtttggttttccattcctgagttgcttcacttagaataatggtctccagctccatccaggttgctgcaaatgccattatttcatttctttttatgactgagtagtattccatggtgtgtgtgtgtgtatgtgtgtgtatgtatatatatatatatatatataaaatctatatctcacattttctttatctactcatagatagctgggcatttgggctggttccgtatttttgcagaaaaatagactgcatatctcaatgaaagaactgcaaagaaatgtgtggtgttttataatctgccacattgtatcttattctgttgtataatataaattggtagaaactaaatataaaaatagcacctaacttttatgatattttggtggtaatttggtatggttagatttgtttgaaagccaaattagagttctacttagatgtccccatcatggaacagggaataaattctccattctcttcacagccagttaagcgcaacttatcatttctaataaactatactcttacttcccagatgagttctgctagtctgttcttgtcagaaagacacatgagcagcagcttaccaggtggctaggttaatttttaattgtcatgtttattcctgtgaaaaatagatttgcctgatgagctgagaaaaatgaaggagatgcaaaaatggtgggttgaattctcacagtgtccaatttactgtcttggaagatacacaattgctgtgttgacgagggtttgggaaacagatatcctggtggtgggaatataagttggcaggtccattctgaagggcactttgtagatttctacgacatccagtcatataacattttaaaagtaggcctcacctgttccttcttattgggcatacttagggatcatttccccaaatgtgttccaaacggcgctagttctagtagaagtaaatgggtggctccaatcaaatgttttcttgggcaaactagtctgggaaatacatcatatttcccatgcaaagagaactattttctgtggggccttggggaagggggaagggagtgctgcttctaatagctcagattgctcatatcttcaggatggaccaaggaaacaaaggcattttaaggtacattattgtactgtggtccctcaaccccagagatctcttgcccaaatggtaatgcagctgattgtccgttggggcaatatcaagctctgaacttcagtggtatactgtgccaagttgttttcatttaaagatgttaaaaagaaaaactgaaaggcacaagttaaaccagggagttttgtccagagcaaaatgtgtcactaagaattgtcaattggaagtttgctgctatcaatatttgggccaaaaatatttatgaaattgccaatcacacgcagtttctccatcgccaaaactatacttcctctttactccaatctggggcagagagttatagcccagagtgttggtcagtcagtctctgaattaacacaacaacattaactagtacctgttgagacctcacgttgcattaactatgtgctagaaatacagtgttagaaatgaaggatgtttccaccataactgagctcttccctccaaatattcactcccttgtttttacttttcttatttagagagacagtatatagcaacatgatcaatagtataaagaaaattgtgaaaaactctgaaattcagtgggtgtcctgactatccaactgggctagctttgcctttgtttgccacggtctcgtcaattttacaactctgtaagaaagctgatagaaatgcaaataattcctgtccatagaacagcaaattgagtttggaaaaatggaattgattattgctgtgtggatattgactgcttttgctagttctgcaatcgtttgtaaattcatttctgctttccttatctgactataaagattctttttgaaccatgtcaaaactagtcgttctctcattaggtaatacgttacataattttttgacattttatcttttatttgtgtgtcatgattatgtcctcttataaaagttatccttgaatactagcgtgtactcttaagtctagttgcctgagttcaaagtcaattgtctggctctgccacttacttgaagggacttacttactttgctccagtttacctaaatctgagcctttgttgacaggcttattttgtagaatgagaataattgtagtattgtcagaggcatttgaaccagagctactccatcttgaataggggctgcgtaaaataaggctaagacctactggggctgtattcccaggaggttaggcgttttagtcacagggtgaggtaggaggttggcacaagatacaggtcataaagacgctgctgataaaacaggatgtggtaaagaggcaggccaaaacccaccaaaaccaagatggcgatgaaagtgacctctggtcgtcctcactgctcattatatgctaattataatgcattaggatgctaaaaggccctcccaccagcgccatgacagtttacaaatgccatggcaatgtccaggaattaccctatatggtcaaaaaagaaaaggaactctcagttctgggggaaatccatacccctttcctggaaaacttacgaataatccaccccttgtttagcatataaccaagaaataactacaagtacactcagtcaagcagcctatgtagccattctttattccttgactttcttaataaacttgctttcactttactctatggatttaccctgaattctttcttgcttgaggtccaagaaccttctcttgggggcctggattggaacccctttctggtaacagtatctaactagttgagttgttgtgtggattaaatgatatactatgtgttaagtaccagtatctagttaagccctgaaaaataggtgctaccattattaattatcaatatttatggagcagcagctgtttgacatcagggagggaacaaaatatacatggcctctggattcatggaacctgcagcctggtgactactctgagaagctagtcacttgcaaagcaatttgaaacaccactgcaagaaaaagcacagtcatgcctctccattgcatgagttgctttcttgtaaagaagtgcttagtgcgagcattacatttagacttttactgtcttccctatacatttatttccaagttaatacccaatgatgagctacttgaattaaattcttgtaagttttaatctcattctacctaatgtgtttgataatagggtggctctttctaaaaaccaagattaactatgtccccttgggaaaacgtaattaagctgtgaaagacacaggccagaggcactccaaagccttgctgttcagaatgtggcacaggctcagcagcagcagcaacagcagcagcagcagcagcagggagcttgttaaaatgcaggtgctgtctcaggcttcctggatcagaatctgcattttaatatgatctccaggtgatttggatgcgcataaaagtttttaaagtatttctctggaaattctgactccctctccccacctaacccacagatatatctctagctggatgagttgcgtgttttaagcatgaaccagcctcaccactcagtactgtgaatttataagtattagttctattgcaatctccttgagaggtaggtctccttttcattaatttacccttagcaattagtattgtagcacatagcacattgtaaaccctctctaaatactggttgactggctgaatggatctgaatttcccaacatcattagctctatacaatttagcatcgagctggatttttccaatgaggcaaacacgttctcatgaagctcttcaaagacacacaaggagaaggttctaacacatgggcctgatgaattatgtgtttttgatgactcattaaaggaagagggagaggtgaaaccaagggttactctattccaggaggcagcgttgtgtaatgataaacacacacattttgatgcctccaaagtctaggctcaaatcctggttctgttccctaccagctttatagtattgtgccaaatttctctgagcctcagtttcctcatctctcaagtgggaaatataataagcttatgccttagcttggatttccctgaaagcaaattctgagatagggatttgggtgaagatagtttatgggggcagggagggatggaggatccttggtattgagaatgaagtagtgggaagagtaaacaaaggactaagaaaagtcataagcattttgatcaagaacctgctgagaaacatagggaatgcctcccagaatggttcattagaaggatgggaggtaggtcccccattggttgaggggtgtcctcaacagtagtaattccttcgcaatggcttgtcccaggtgagcctgttctcaggaggcagaagcagaaactggggtgcttgaggtgcacctgagactgaacaaagctggcctctgcagctgcagatgaactcagaggtcacagcaccatcaatgtctgttacagctttccaagaggatccagtgaaatcacatttgcaaagccaggtatcacaagtgctcgaaaaatgctaggagtgtcacccactcagtgctgctttggggagcttcagtttcactcctcactttcgagaagtgcaaacaattctgttgacactttcccatccttgcattctctctccttcctcttcttctcactctgtatgccctcaaataagaataaatcttgtctggatggcaataagaagcaaatctaatcagatttgggagatgtggtcaaagctcagagaataaacggttatacagatcctttcccgttccgtttctgtttccagcctgccatttttacctcactgcaaagagaaaatggaattgatggagatataggaaaaatatgtatgtatgtgtgtatagatacaaaccaatatatctatatatatttacattggtacccagtaagagtgaaaactctaaatggttgttgtcagggacaatgtgtgttttcccagattttgttctgtgaattgaaaccgactttgctattataaatgcatcactataattgccctgatttagcctggcagttatgactcctgctcagagccaaatgtctcccagccaagacccagtgagcttgccaaattgtttcacctcttttattgtcagaactcatcgcccctcctcacactgttgtgcttttctataatattttaggtatattaatcataaatcctggaattgtttatctacaaaaaattgaagtcagggagtcatggaatagtcatttatcatgggctttggctcagtgacttgaaactaaaagtagaagaaaaacaaaagcactgattgtgtagaggtggccaaatgcctggaggttaagtgaaatgaaattaaagaaaaaagaagtcctctctgatccttagcagaaattattcactttctgaaagaagctttttctctattgagacttctatttggaaatgtatattatagatttttttttgcctgttaatctgctaaatgttcatttaacaatagaaaatgtttgataataaaaccattgctttttctgatagaggtacttcaattatgaggattttataaacgtgttctaagtattcaatgcttaatagtggggttgctatactattgggtgagatatcaacctggtgtgctggcagacttacttctacacagaaagagactttttgagaatgaagccaatacaagcaaaacagagcctagatgttgatgacacctgatggtcctggatacaaccatgcctgaagctggttttcctgctgcatgagctaatattccagcttttacttaacccatttttagccaaatttctataacttgcccttaaaagtcctaattaatacatttgtccagcatgtcacctgcttttatcatttttaagacaaaagttatctaactcagcctgaaatgtaaaatctcaaagaaaagtgcgttgaatatgtgctgctgaaatgtgtgcttccatcattaaaaaaatccacctgacatttcaatttaaataatggacttacagctttcattaatatttaaaatagccttgtatgttttgcaagattaaaagtgatacaagcagaatcagggttattatttaacaggacaggtgactttgtttatttaatattataataaatgttattaaatattgagataagaacatttaacatgagatctatccacttagggaatttttaagtttacaatacaccattgttggctatgggacagtgttgtagattatatctctagaactgtcccatcttaattaactgaaatttgtgcccaactttcccacttccctcttctccaagtccctcattccagtctttgactctgtgaatttgtagttgtaaaacacactaaaaagttatcacaggcattttaatgttctggaggcttgaccaacatctgctgcatgtctaggtatttctgaagtcatctctaaaaaggtaaaacttggaaataatcctatttcagtagagtaattgacatcttgcagatattataatagagcagagaagtgggatcaagttatcaaaatgtacttggcatattttattgatcgtttttttcctggtttaaaaactgagaaaaggaagcccaggtgtttgtaaacaacatttcatgtgacccatctccatatataccaccttctggtagcttccacacatttgatctactcatgccttttccataccccaccaaggtcatttagtaaagagaaggagagatttggagtgtgcaatcacaagtgtggatagtgagaagtgattaatagaagtaggtaggcaaaatgcatcttctgtaaaagggatgtggagctgttgtagagttgttctctagtttacaccttaacaaatagcagtttagagattgcttgtgggggttgttagtgtgttaggttataggattagctatgttgttgtggcgatttgcttaattaatggcaacaactggatgttgaaattgggtggtagtttgaatgtttggtagcacatgattctatcgtggagagtgtttatgcttttaaatgatgatgttttaaaaaggcaaaatcctgaccttcatgcaaatacaaaatgaagatgtgtcaaagattttctttcatttattaattgataagggaatcaataagatgttacaactggtgcaaaggagaatccaaagaacagacaaatatatagctcatcaaatgctgaaatgaatttctttagtaaatacaaaactagtcaatatccactggacaataatcaatggcatgccaccaaatatagttggcattcctgtggacaagagtcatttccattcctcttagtttttagctcaaagacaatgaaacatggagataaccttgatgtatgagctggacaaggaatctactaatcttaattttgttcctaatggaaaatctttcacatgtcttcataatgtctcagcacaagatgcttcttttatgggaaattttgtcttgctatcatgtttagaataaaatcccaactccttagcatgaccacagaaactttacaatgcgagtctttcctatcttcctgatcttatatctaacatcttcccacttctttccctgccacttcctactcacttttttcccctttgccttgaatgtcagaaacctcccagagttgagcacctggtgtattagtccgttctcacactgctataaggacatacctgagactcagtaacttataaaggaaagaggtttaattgactcacagttcagcatggctggagaggcctcaggaaacttacaatcatggtggaaggggaagcaaacatgtctttcttcacagggaagcaggaaggagaagaatgagagacaactgaagggggaagctccttataaaatcctcagatctcgtgaaatcttactggcctctcaagaatagcatggggaaaaccacccccatgattcaattagctcccaccaggtccctcccatgacacatgaggattatgggaactacaattcaagatgagattttggtggggacccagccaaactatatcatctgggtatgctgtcttcttcaactagaaaactctggctctgtatttacaggtttcagttcaaatcccaccttctgagcgacatttttctgaccatccaatcaaaagtatttatctgtgtcaatctccctcatactacccttcttgatcctcttcatagcacttattattccaagcaaccttgtataattttacggattacattttatatattgtccaccccttcccctactgtaagctcaatgaggacagtgaatttgtcttattcactgctgtatccctggttcctaggacagtgtctagcacatggaagctactgtataattatttatatgtttaaaactatatttattctttggaaatttatttgtgcagtactgtcttagttatgataactttagacaaccctacctattgcagatgtaacccccaatccccaagtctctgtggctttaatgcaacaaaagctcatttcttgtttaggtaagagtccaggaaaggtgtcctggttggatggcttttgtctaaagtcctggattcatggatccaacttccttacatcctgctctcacaccatttgcaatacctggcttccaaggttgcttggttcatctggaatgagtcaaagaagggaagatatatgggaaggtttatgggcagactgggaagtggtatacatcacttccttcatattccattgtctggaattcagttatgtagccatgcctatctacaaaaaagagagagagaactctgctccagccctgcacccagaaagtaaagaaaatgtgctgggcattgtgctggaaacagggacttagctgtgagcaaatgaatattttcaaaattagagcttttatgagtataggataagttgttccggacagaaatgcttatcaaaaaaaaatttaagattttaaatattttgttgtaaaaaatcagagaatatatgaaacaagggattacaagttaatatttggaaataatattttcgggccaagcctaaacaaaggatttgaaaagaagaaagtatagcagagggaatttgaaagcagaaatatgttagataaagcagcttttggctctaaaagccaaaatcaaatattatgttttccaaaagagatttcaggtataaagttgaactttgtcacctgaaataactgaattatattctctttcctgtttgtagacactcaaccctataatgatagttgaatctaataaaatgcaaatactcattttaactggagtcgactgattttatagacacaattgttactagattttcctatgagaatgatgacataattgaattgctccttttaatcctttttcttaatatctgtttagatggaaataagaattttgccaataggaacatattaactggattaatttccagttctgtgggacatttttttcctctataagaaaaaacatctctccactcagtatagatccactatgacaaattagtattgtcctttgttcacagctcacagtaagagaaatgtaagcaggtattagccaccccctgctcttccaatagagggtaattttaatgtcttgcaatttgaagacttaaaaaagaaatcacaccaaggtaaatcattcctttcaaaatccagtaatagaatttgtcatgaaggtcaaaattatctaggaaagagagagctaattcatgtgtgtaaagcaaaagtgggctgtaggttaatacttaggtttagtgaaatgttgacttttggcttctatgtttttataggttattaaataaatcagcctagaaaatgatttgctttactcacactgtgcttatgaagcaacacagcaaccaagccaagcctaacttttcagtatcaatctcatctatagactttggtttggctgtcttaatatgtttgagaaacaatcctcttaaagattgtaattacaacctgttgggattgtagctattttgtagttagcaataagaaatttgcctacatcaaatagggagtgatggcatgtgccctctcttctaagacacttacagtgtattagttatctattgctacctaacaaattactccagaacagtggctgaaaacaacaaacagttattatgtcacatggtttcttaagtcaaaaattccagagcagcttagatgggtgtctctggctgaggtctgccttgaaggcccagtccagacatcactggggctgcagtcgtttgaaggcacgatgggggctggaggattcacctccaagaagggtcatggtgcaggttgttgccaggaggcctcagctcctcaccatgagaacttttccatgggctgcttaggtatcctcatgttattacatgtggctttccccagtgtgagtgatccaagagggcaaaatggtacccgcaacttcacttatgacaagcttcggaagtcacactctgtctttttacaatatcctagtcagccctattcaatgtgagaggttttgacatatgagaagatggggattgttgagaccatcttggaggctggctaccacaataaatttattgtgaaataaattagaaggcatatcacaattttgagggtctttaagttggtaaatgacaaataaataaatacgtgcaacttagcagaaatatggtattttgctatttaagagcaaactggtaatcatgagataaacttttgatggaccttgaaatgcactaactcataggcttaatagcaacaattctttgttctatgtaattaacacactggctcaaaaaacaagtatctatttctggcagggagaataaagcagaaaacaatcacactatagttttctctggaatgtatcagcaaatatgtacccttctgtacacttagctggtgaacatccaagaagctatttgactttctcaagagatggtagattcctgctagagtctagttctcaacgatatttgttagtatattatcttaaaagcctcctacatttaacttttgaaacccgttttatgaagcatttaaatgtgaagtttgttgaattatctgcaagtaatacggttattttatacatggaaccagtaggcgtgaatatgagaaaaagatgggattactcatggaccattgattttttcatttgctattgtagtaaatcctctagtttaccttgtattagatcaattaaacctagagtcataagactttgtttcaaactaactgtgaacttggaccaatcaatcagtcactaagcctatgagttagtgcatttcaaggtcaatcaaaagtttatctcatgattaccagtttgctcttaaatagtaaaataccatatttctgctaagttgcacgtatttatttatttgtcatttaccaacttaaaaacctctccaagtctaaatttcctcttatataatgttcattcatttatgtgcctatcacaggtatttgtgtcttatactattctagaagttggaaatgcagtgatgaacaagagagagagttccttctcacatgcccttacattttagtggggggcacaaaataatcacatagctatacgacaaggcagttgatatgtgctaggaggaaacattatcagggttgtggagggtgcaatttcagataagaagttagggaaggctgctctgttgagaacagacctctgaaggaaagaaggcacagggtcatacagaaacccggaggcagggtttaaggcaatacattggaaagtgtctgatgtgttttaggaacagaaggaccaccaggtggttcaaacccaaagagttatgagaagggaagtgtgaagtttgtcgagatgatgagagctgtctgtgtttcaccataaggattctggaatttatctgacagaccgaggaagccactgtaggattttgagcagagaagtgacatcatctgacttaggttttaaaggtatcaatgtggctgctgggtgaaaaatgaataataaggaatcaaatagggatgaattgtcattgaatggagcaacacttgcattagccgaggtgaaaggcaaaagcgattgtgtgggtattgccagtgggcagagttggggagaaatggttgcagtctagatgcctttcaaaggtactatctctttgtcttctagatttatgaagaccattaaataagataacatatgtaagaacactttgtgtgtgtcctatcctgttaagaaaagccatctcatatgcatttttatttagctgctgacttaacttctttataatgctcatttttcccttaacaacatttttgaaaactattcatgtgtattagtcttattaaaatgaatgttcaaaccaggttgacaagcaggtaatgtagactttcccacccctcccctgtttacccaagagatttggtagttaccttaaaggcagaatgttataagtactgagatatctgcagttttttcttcttctttgggcataaaaattattaaatgaggaagaaggttgcattttataagtgatttgttggacaatttagggtggttgttttgtgtgttgttgtctaacattatctaaaataaatataaaccatccatgtaaatttagattttgtagcaggcacatcataaaacataaaaaaaatgtaaaatcaatttttatatctattgtatttaacccagtgtattagtcagcattcccatagagacagaactgataggatatgtatatacagtcatccctcagtatctgtgggggactggttctaggatgtcctctcagataccaaaatttgcagacatacaagttccttatacaaaatggtatagtaattgcatataacctatgcacacactcccatgtattttaaatcatctctagagtcctcataatacctaatacaatttaaatgctatgtaaatagttgttatactgtgttttaaatttgcattatttttattgttgtattgggggggtttaatttctttcaaatattgtggttttgtggttggtcaaatcagaggatgtggaacctgcagggacagagggcctactgaatgtgtatgtatagacatagatatagacatatacatagacacagacatgtagctatagacagacatagatatagatatatagacatagacacagacacatacagatatagacatagacacagacacaaatccagacatacagacatagacacagatatagatacagacatagatatagctgtagacgtagacatagacacagacacagacatagatatagacagacatggatatacacgtagacatgtagatatagactcagacacagacgcagatgtgtgtatctagacatagacacagacatatatagacatagatatagatatatgagagggaatttattaggggagttggcttacaggattatggaagctgagaaggctcatgatagtccgtctacattctggagcccctgggatgctgggagcatggcttagctcaagtccaaaagcctctgaaccagggaaaccaatgacataatcctcagtctgaaactgaatgcttcaggacccagggaggtgctggcacaaatccttgggtacccaggacagagggcctggagtactgatggccaggagcaggaggaagaaagagtcccagctctgaaggggagatagaaaagaaatcctttcctttccttttttattctatcttggcccccagcccatggtatggtgcccacccgcactgagggagatcttccccacgcagtccattgactcaggcaccagtttcctctggaaactccctcacaggcacacccagacatagtgctctaccagctctctaggtattccttcattcagtcaagctgacacctaaaattaaccatcacatgcaatatattcaaggtattataatttcaatatgcaatcaatataaaaagtcattgttgagatagttcacatatttttggtactaagccttttgagtctagtttgtatttcacacttatagcacatctgcctgccttatctccaaccccaacaagtggtcctaagcatgcaaacattctttgcccttgctcatctaggaggagctcattccctgtggaggttttacttctagatttctttgtgtccacatttctttgggctttaaataaaagtaagagttttttccccccctctttgttttttcaatgatttcttactgattggtataaaagtcttccctgtccttctctgtttgttcttgatttcagcttatttgtctgaaagtaatagaaattccttcaaattagcttaggaaaaaataagtgaaattgttgtaaaaacacacaagtgtcccagactttcagggaaatggtaagcgatgcctccaggagaacaagaaccaggaacaaaaaagccatcaggaagcagagaggaagagccttttttttttctttttctttttttttttttttgagacggagtgtcactcttgttgcccaggctggagtgtagtggtgatcttggctcactgcaacctccgcctcctgggttcaagtgattctcctgcctcagcctcctgagtagctaggattacaagtgcccaccaccatgcccagctaatttttgtatttttagtagagacggggtttcaccatgttggccaggctggcctcgaactcctgaactcaggtgatccacccgcctcagcctctgaaagtgctgggattacaggcatgagccactgcgcccagcaaggaaggtctttttcattattctcgctctggggctcaggtgtctggtagttacacatttgtgcttcactttttttcttctcttttcagttttctctgcttcgttttacataaagaaaattggccacccttgccatggcacaatattgtttcccagctcttttcccttcagctgaccaacatgtcagtgtcctattccacactcctaggaaggagaaactgcttagcacaactttcatgaggggtccactcttagtccaatcagctcttgccaagggccagggtctttccatataaacatggctgtggtgactcactcctgtgcttagacagctcttagagagaggggatctgacatcttctctccagatattctaataggtgatttaaaaatagaaccctctaactcactttgctccaatctcactcatactcaccaaaaagagccttagtgtaaagtattatttggacattattattggaggccatattggtatatatttatgaaatgtctgacatcaattagcatacatattaaatgtcaatcttattctcaaaaactaatttagaactgtctaaccatcttttttttttccagaaactaatttggaagtgtctaaccagctattgtaactgagagccccattttcctaaaagttatctttaccttttctgtttttccttgtgtgttcacctcttacttcgctctttaagaatgcaattgtaactgttaccttctctccaccaggcagttcctgcacggcaagcttatctaactatatgtttgcttagaaattctaaggaccaaatgttggaccaaaccgtgcaccctcagggattctctcctaccatgagattgacaatggtcaatttatagcccagctttacccaagatggtgccagacagaccatctaaggggtaagacattgaagcaagttatggggactccacacctcctcattctctctcctgcctgccactcatgccaagtgcccccatccacctttttttgagacagggtctcactctgtcacccaggagtgcagtggtgcgatcatggctcactgcagtctggaactcttggactcgagtgatcctcccacctcagcctcctgagtagctgggactacaagcatgccaccacactgggctaattttttgtatttgttgtagacatggtttttttttttttttgccatgttgcctaggctggtcttgaattcctgggctcaagcaatccacccacctccaccttccaaagtgctgggattacaggcatgagccaccatacccaacaccaagtgtcccttttaaagcccctgctttctgccccaaaagctgaagtgtttcccttagaggcaggagcctgtactgtttcccctcagctaagctctggagtaaagcttgtttaatttctaccaaaccttcctcttgttaactggacttggcaagcagcaagaggccagacctgcatttggttatactatcttctccaatagcaaattagcagattacaaatctcattgaataatcagaaagtaattctcatttattgcctaaacacaagtagcagtagtcttctcctgtgcacactcattgaagttttttttttactgattaatgtaaaaaaatttaagatctatattcaattataattatggacatcttactagggtcctgagggcagataacaaagtacatatgaatggcaaaatgagtgtagagtgagcgaatgatattccttcatagtcttgatttgagttttaagtttggggggggtccattgaataatttattgataaagaagtttgcctatatgtggctctcactgttagccaatccaatggcactatacatatggatgagatactaggtcttgtcttctcaatgatatcaacataaattactcacctgtttatcttctctcaaaatatttagacaatattgattctatcagggcagtaactagcttaatgtctccctaataaacttccatttaagaaggaagagatttatgcctaccaatgttagcagcaaaataatgtgtccattcaggcaggtccttctggggttgggaggttttcttttggaatctggaatgccccataaatcaacacaaggccttaagtactgaggtcattacagaattattggtaaaacatagtgttcgaatataatgaaacacaggccacatacgtgtccataaacatgaagccccatagttcagcagttacaagcccagaatgcaatgtattcgatgacaattttcaagatgaagagttgtagagctcaaccacgtactaaatatatcgaagatttagaattgatctatagtccaccgaggccctctgattacttactgatgtcagcatcactcatgaattatgtgtctgtgtgttcctcatgaatataaattccaatctctctggcgtagttatatggagttagatcatttgtgtgatgacatttcccatgtgctgagggggaaagggagacattttatagtgtttaaaaaacatgaacagttttctggcacgaagaaaatcatcaagagcccagaaaaacacaacgtgtctcccatctcctgctaacatacaatagtcaacttaaaccctaacaataattgtatttcagatcatatttgccctctctgcttctcaccttctgcatcatttcttgttaaattcagaaaaaaatgtagttgtcttaatcaaaaattgttttctggcagtctttagttggagggctctagctttcatggagatcatttgggctcaaaaatgaattagttactttctcttttctagttgttttttttaaaagtggaattagtaagcatctgtatcagtgaggattttccagagaaatagaatcagtacggggagataacaaatgatggatgatagatagatagatagatagatagatagatagatagatagatattcattgaatccaaggaattcatttatataattaagaaggttggtgtccttcttaattcgtctgttttcacactgctgataaagacatacctgagactgcgtagtttataaagaaaaagaggcttaatggacttacagttccacatggctggggaggcctcacaataatggtggaaggcgaaaggcacgccttacctggtggcagacaagacagaatgagaaccaagtgaaagggggaaaccctttatgaaaacattagatctcatgagacttattcactaccaagagggcagtatgggggaaactgcccacatgattcaattatctcccactgggtccctcccacaatatgcgggaattatgggagctacaattcaagatgagatttgggtggggacacagcgaaactatatcagtgggcaagtctgaaatctgtaggataagacagaacacggggaactagggcaggatctgatgtcttgagtcctgtgtcttgaggcagaatttcttcttctgcagggaaacctcagttttgatccagaggtctttcaactgatttagatgaaatcctcttggattatcaaagacaatgtcctttaaagtgaagtcaactgattggagatgttaactccttcaagtaccttcacaggaacacttagattagtgtttctaatgatagcctagctgggttgacattataaaactaaccattgaagtatcctttggttgtaaattgtagcacagctaatcaaactaacttcctaatattggctaaggccgactgagggttacttatatgcaggccctgttctgacactttatatgtgtcatctcatcccaagatctcactgctagtcatgccagagggtgagatttgaagtcaaccagtctgactcccaaggttgaacactgaactgctatactattttgactccaagtatctcaaaagaaaatttattcgattgtatatttgcattgtcaatggggtggctctagtttcaggtatggccagatccagagctcagaggatatgattaagacttttgtttctctatttgctttgttttcattctcaggaaggtcatctttttagtgacagctccaggtttatgttttctgagctccaaaactccggaggaaggagagataagagaacttccctttctcggtagttcagagagaattcctcagattgcctctgagatgcttgcttgggtcatccactcattcctcaatgaatgaccaaggtcaggagaatgggatgcgctggtagaccaggcgtgggtcgtaggtctacttctgaggtgagcagtggtgtactgtccctgcctgcagcacccagggtgagagtgggaaagctggattgtggttgaaaatcagggtgtcaacatcagaagaggaaatagatgctgagcaggcaagaaagacagacatccccagtaatttttgccactgcagattaagaacatcttctataggatcaactccaaatttcttaccaggactcaaggaatccttctcaattctgtctccagccttattttctgctctttttttagtttgctgccatcagactgatttccccctcgttgcttcctgccatgccacatcatcctgcatccctccctcttcacaggccatttccctgccgtgactgcttttcctggacacaccacttcgttttgcaaacactgactcgcattttaccattttacgaaagcctttatcatgctgccatgaattcattgatttgttcctttattcattccttcattaacacttattacattcagtgtaatgcaaaaatgttgaggatgtggtgggaaactgggcagacctggcccctctcctcatggggtcgtctcctttcatgacacttgatcatgagcctaacaaggttagggtctgtgcctgatacacctttgtatctctggaacttaaagagtagccccaaagaagatgtaaaggcaagtggggtctggagtcataccgaccaggttagcagtctagttctgctgtgtgaacttgggtgaattgttgaatcttcctgcacctcaatgtcctcttctctaaaatgggaataaaaatttctaccttgttagatggttttgaatattcaataagataatgtatataaagtgagcatcattgcatttagcatacgataagcattcaatcaaatagtaaacagctattattataataaatactcaatatatgcttgaatgaatacctggttaaatcaaccatgtgattgtaatggcgtcacttttcttgaggtggggagaaaacagctttcatggcactgccttctttcaaaagtgaaagccctggatttaaacacgaacataagaaacttgaaatgttataatgacacttcaatgtgaagacattgactcatccccataaaacagcttcttcaaagaaaggtgattacaacttaggtgtgcttggtggaaattctcactatgcttcacaaccgagattctttccttgcagtgttttccgtatttaatggagttgggattcgcgattccctttgagaataggtaacaaagcaaagttttatattttctccctcaagcaatgtaatgattaatggaatgtataactgccttctcatattatcaacccatttacccaaggactcagtacagtccttttcatattattttctattaaatgatgcatgccacccaacatctggagacttggcttcaaatctgggctgaagctacaaataaaagtggatttaattgtctctatttagtagattagcaaattcataatcgggccagtgctgtttctgggggaatttggaatggtgaaggctgaggtactctcacttaaggccagagtttgtgaactgagttggggaaagttaaaaagagacttctgtttttgcatgtgcacacggagacaaatgcagagacagacactgcagctgtttgtcatagctaaaaaagcaaaacgacctaattttccatcgacaggggaaatgagaagtaaacttgtttattcatgcaatggattatgtttcagcagatctacgtaaattgtacatttataactaggataaaatgcaacaacataatgttgagcaaaagaccccatttgtctacatttttaaagaaccggaaattatattatacattgcttaagattatatgtacacactctcacacacacacacacacatatatatctcaaagtctagaaatacgtgtaatagtcatctcagtaaaggaggaagaaaaacatatgagaagtaatacttaagtcgtatttgtaatttattattttatttaaaaagaaaagatccaggccgggcacggcgactcacgcttgtaatccagcactttgggaggccgaggcgggcagatcacttgaggtcaggagttcaagaccagcctggctaacatggtgaaaccccgtctctacaaaaattagccgggcgtggtggcgggcgcctgtagtcccagctactcaggtggcttgaggcggaagaatcgcttgaacccgggaggcggaggttgcggtgagccgagatcacagccattgccctccagcctgggtgatagagcgagactctgtctcaaagtaaataaataaagatccaaagaaaatataaaatattaaattttgatggtatgtatatggttgcaaaagtattttctgaatgattcaaattttttaaataattagaaccaataaaaagaataaaaacttgcaagagaattttgtgaatgtcagaagactaacacatattattgtttcagaacttctggaaggtagaaaattcactcccaacttgataataatgacagttataaaatgaaagaatcttctataaattactgaattttacatgtgccatagaaataatttctggcccaacagagattagaaatcagggataataataaagaaaaacagctggcacttctaaaatagctcatctctcctatttttcagtagaaggccctttctgctagtagaagtccttacatttcacacttctgttggacaccttcatcttttccacccctgcttcaatccctgcctggcaaatgcatttctcttttcttttctttttttttctttctttctgactgagtttcgctcttgttgcccaggctggggtgcaatggcacgatcatggctcactgcaacctccgcctcccaggttcaagcgattctcctgcctcaacctcctgagtagctgggattacaggcacccgccaccacgtccagctagtttttttgtatttttagtagagatgggatttcactatgttggccaggctggtctcgaactcctgacctcaggtgatccacctgcctcggcctcccaaagtgctgggattacaggtgtgagccactgcacctagttggcaaatgaatttctaagtcaagatatttcatcagaatagtttgtacctctggagtatttctttcctagggttgcagtaagaaagcatgacagactgggtagtgtaatcaacagattaattttctcacaattctggaggctgaaagtctgagatcattgtgtctccttggttgtcagggttgctttcttctgaggcttctcttcttggcttttggatagctgtctttcctctgtgttgtcacatgacctcccttctatttgcctcaatatccttatctcctcttcttataaggataccagtcctattggattaggattcattctgacagcctcattttaacgtaatgaactctttaaagaccttatctccaaatacaattacattctgtggtactatgggttagagctttaacgtggtaattttgaaggaacacagtttactctataacaccaagatttctagattagttttctctttattttcattctaccatcccacctcaagtcattttatctccacttcttatttttctttttttccatcaagtttgtttggctgttcagttggttttcttagaagattgctttgattatgtagtgattcaggacttgggtttgaagttacttctcacttttaatattatttatatatatatgactttggggatattattatgcctttctatgcccagttttctcatctgtaaaatggagtaataatagttcctgcatattatgttagtacctgtaccactgatggttcataaagtgatttttaggtggagtgtccaagtttaatttttaaaaaaccttctactgatgacaaaggatgcttactttctcttcatagcagtaattcaaaattttctttataaataaaatacgagttatttaaagtaactctgaccttcaatcttttattatcatgagaataatttctgaaatagtattgtccttattgcaaatgaatatatgtttattgttttaaaaattaggaaatgcagaaaagcaaagagaggaaataaaacttatttgtaatttcaccgtcacaaaataatcaagtttaacattttagagtgtgtatttctggcttagttcattttgtgttgttagaataccataaactgggtaacttctaaagaacagaaatttatttctcacagttctggtggctgggaagtctaagatcaaggcaccagcatctggcaggggccttctaactgccccctcacattcaggaggcagaagggcaagggagagtgagtgctgggttctcacatggcagaagaacagagaagagtgagtcagtctcacaagcccttttagtggtggcattaatccattcgggaagacagagacctcatgacccaaacacctcccactaggctccacctccaagcgctgttacaatggggattaagtttctaacacatgaatttctgggggacacattcagaccacagcaccttctaattattctgtctctctctctacctatcatcttttacaagtctttccaatagtagcattgatatggtttggctctgtgtcccaacccaaatctcatcttgaattataatccccacatgtcgagggagtgacctggtgggatgtgattggatcatagggtggtttccctcatgctattcttgtgatagtgagggagttctcacgagatctgatggtgttaaaagtggcagtttccccagcgctctgtctctcctgtcaccttacgaagaaggtactttcttctctttctgccatgattgtaagtttcctgaggccacctagacacgtagaactgtgagtcagttaaacctctttcctttataaattaccaagtctcaggtatttccttataggagtatgaaaatgactaatacaagcattaatccattatgctggacagttagataaatagattgcacccctaaaattcatgtctatcaggaacctcagactatggccttacttagaatctttgtagatgtagttcatcaagacgaggtcctatttgattagggtcaggcctaatctgatgattgatgtgcttctgagaggaggagaggacacacagaaagaaacacagcatgaaggacaccgtgtgaaagtggaagcagagattggagtggtgcatctatcacacgaggatcgctaagaactgctggcacccactagaagctaggacacaggtacacaacagattctccctcagagcctccagaagcagccacatctgccattgcactgacttcatctctaagctccggagctttgggagaatacatttctgttgtttgaagctacccagtttgtggtaattttttatagcctctttaggaggctatctatgatatagattttaaaaatgaaaatgggattagatcgtataagccatattcttttgtagcttatttcttttactgaagctactttaatctcttctgtcatttaatactcttctgcaatatagtttttaatgtcataatatttccttttatgagagtacattagtttatcagtctccttttatgattttagactttgtcataaagttgttcttagaaaaatgacttgaatgttagattctcataagaattaaatatggagggaccttggctgtcttggtccctgctatatttattaaatagtgctggacatgtaggaaaattgtccatcttattagacctattgtgtaaagtaaaattgaaaggacatgtgcatttttgcagctttgagaatgtattgccaaactatatatcagataatttttcaagtgtgaaactaagggaataatttttatttttgtttgcaaatgcatacaatatgactatagcaattagatttgtttaatcccaaagctctcattcctttatgagtctggaagtagtttgatatgcaaacctcctgatttagttattttagaccacccatttcgccttcaattattttgattttgtatcttcttctctgggacaatcatgcctcatatcatccaattagctcaaattcagaatgtgggcacaggaggcagaaattactcaacaacttgatgcttgtttagatttgagtcatacttatattttaaaagtaataattatagattatgattcaatgaataattctgtatgttatcagaaatattagtaagagaagcatgaaaatgtgtaatcataaggatgacttcattgccaactattgaaagctattttcaatgatttgtttttccccaaagagcagatggcttaatttcctcaaccatcttctggggaaaaaaacatatatttaaataataagaaacagaaaattcagttcatccttgtaacataacaacaagaaggtcttagcagtgcttatatttctttttactaaattatcagattaaagagaataaaacctaatcagcaaaaccgaagcctggcaagttatgaaaattgaagaaaataagggaagacaaaaggaaaaaaaaagagataaagggagaaagaagagaagtaaggagggagagaaggaaggaaagaagaaaggaaggacggaaggcagtgtaaatagcaactcccctttctaagaaaaatattttaaattaaactcaagcgcactgctgcttcctgtctcttagcagtcaagtactgttaggagacattctgcattagaagggtataactttgatcaagattttaccaaataaattaattgagttttaaacaaatgccatcttttgaaatactgcaatcatcaatgacattgaaaaggagactgaaatcgaaccttatctggttcctgttttgtgacaggtgctatgttcactgttgtgtttggtcttcacaacaacctggtgagctagatgcttatgtctgtttttagcatgtggaagattaattcagggtttgaaagtattttgtttaaggtcaagtaaaatgtggaaacagcgttaaaagcaagttacccctgactccacatctcctgctacttctgctcttctaggagggtcgtcctggaacagagacttaaacgtatgccaagggagcatgagcaaggagggcgagcaggctaccgtggatgggtgcagctggagagggtgcagtgaaagagcgtagtaggagatcaactcagtgaaccagccaaggtaggatcacctaaacccacgtaggcaatggggggactttgttccattctagtaacacagaaagccattgctggagtttcagcagagaaatgatacgatctgtcttaggtttaaaatacctgttgttcagagaatgggttgtagaagtttaagagtcgaaacgggaaggccttttggaaatgtattacaataatccaggatccaagcaaggcatgatggtgctttagaccaagacaataacgatacacatgaaagctatggatagattctgaacatgtcttgaaagtgcagccaagataatttctttgtaggttgactctggggtgcgagagaatgcgagaatgaagaatgtaatataagaaataagaaagacagccagattatgactctggttcattgttattttatatacagaacaattcctttgcccctaaaaatctcaggctgtcagaagacagttgtgacagaagaagtgttggaactcagcttcagggctacatgaaggatttgttttattttacctgcagtttttttttgctttttaaatatattttttgatatcagactcctagtatatgaagggtttaatgttagacatgtcctaaggagcagacggagggcaagccaatcttctagcttgtttatgacttcagcaccaaagaacaatttgttaccatttatttctattgccaagacctgagaaggttgggcaggtgctatagaaatcgtatttttcatcaatgcattattctttatgatcatatatctatatgctattctttcgcttgtgacagatgttgtgaatgtgtgtctgtgtgttgcgggaggggagtgtgaggattgtatggatgaggaggaggtctttttagaataagaaccatttgtttatgatcaagtttgaagtacagtgttattatatttcctaaggctctcatttaaatttgaaggtggagaaaactcaattttgctattataattggtgaatatttttccagactaaaattcaacatcttttttgaaactatcctcttttggaagaccctttaacccagtaaaatcatttcctctaggcaaagaatgtggatggagaagagccagcgggttggttccatagcaccctttagtagatagaagaaattatttcttaaatttccttgtatccaaagtaaattatagaacaaaatcttgaaatgcgttctgatttggaggactcagattgatcctgaaagcttcagtagttattttggagaaagaagaggtacagcatttctaaagcaaggaagaggagtggatgcaggcaaataatttctccaagtcagagagaggtggcaagaaaattagggtaattttaaaaggaggagcttagagagtaaggaatctgttcagaagggaaaatgaggccttattacctgggtgcatggatccaagtgggtgaatatagcaaaggatcatattggttatcatgtagagctgagtcataccctggaggttattgaaggaagatctcatgcctgctctcatggaacactaattctggtgggtcttcactttttcacctgcaaacgctttgctcattgactacttactgggagggcaaaagtttctgcttcgatactttggttggtctgatttgattccctcatgtggatatctcaggatacccaatacccatcagcaaagaattcagagatggatctctgcaaacctagggagatagtgatggtaaggccgccaccccaagactggctgtgtggcgggacaaacgtgaaattgaaccagcttgggaccatcctggagctatgacggtcgttaatcactgccttgctcattcttttttgtgacgtgactaaggaacaattctctctcaagcacaaattggccaggaaataagagaaaatgtccacatagaatggacattcctgagatttgcagccactagaaaactgaaccacaagagactggtagagtcaccaggttatggagcttatgatatggtgaaatagtcatgcttagcttaacaacagggattcactctgagaaatgcactgttaggcggttttaacattgtgggaacatcatagagtgcacttacagcagcctagatggcatagactatacacacctaggctttatggtgtagcctattgcccctaagttacaaacctgcatagtacgttattgtactgcatattgtaggcaattgtaagacaatggtaagtatttgtgtatctaaacatagaaaaagtacagtaaaaatgtggcataaatgataaaaaaaaatggtatacctgcacaaggcactcatgagtggtgcttgcagggctggaagttgctctggtgagtcagtgggtgagtggtgaataaatgcgaaggcctaggacattactaggcacaactatagactttataaactctgtacacttaggctacactaatgtgcaaaaaaatgaaccttagcttactgtaaaatttttactgtataaactttttaaatttgtaaatttttgacttttgtaataacacttagcttaaaacactagcatattgtacagctgtacaaaaatatttcttttttatatccttattttataagcttttttctacttttaaaattatatttttttatttttaaacttttctgttaaaacctaagacacaaacacacacattagactaggacgacacagggtcaagatcatcaacattactgtctttagcttccacatcttgtcccactagaaggtcttcaggggcaataacttgcatagagctgtcatctcctaggataacagtgtcttcttctagaatacctcctgaagaacacattttacaggtaactttgtaaaaataagtagaatgaatatactctacttatataggattgaaagaagagaaacacattagatgagcacacattcatcttggctttgtttctgggagcacgttcttaataatggaccatggactgttccaaacagtggacagtagttctattgagttgaagaggcagagaatggaatttgatatagaggtagctgtagtatttggactagagtagtagcaagttagaagctggggaatatgtagggaaggaaaggggtaacttagatatcagagccagtcctgtgaagttagagattggggtgctcgtgcagctagattggaagcactttgctgatcacttcatgtactcagttgagatccccaaaggccacaggttagaagcaagggatatatcctatggtaaaggaaaaattcaagttatacctcttctagcaaggcataaaatcaaacctgataggatccagaactggtgatttaactgcctaccagaatcaacacctttttttttttttttaacagaatgactatgtaaaccagactccctacaaaatgtaccatttcataatgaccagcatataatccaaaacttctaaacatgtaaaaatgtcacctaaaatctagagcaaggatcagcaaacaatggcctgatagccaagtgatctgccacctgttttagtgctacagtcttattggaacacagatcatttgtttacaattaaatttgtaacaatttaattaaggttagagcttaattaattggctattgccaataaaactttggccatttttcatctatggctatttttgtgctacagtggcagagttgagtagttgtgacagaacctgtaatcccacaaaactgaaaatatttactatctaaccctctacaaaaaaagtttatcaacattaaaagtgggcaattgaaatatactccaagatggtccagattttggaatttgtagacaaagatttcaaagaaactatttttaatgtattcaatttttttaaataaggataaacataatgagtgaatatatgagaaaacttagtacagaaaataaagtataccaatggatattctagaaattgaaagtaaaataattataatatctaaaatgaaaaagtcactgaataaacataactagagatgaggtgctacagaaggagtttaaataaacttgaatttgattaaatagaaattacccaagctgaagaacagagaaaaaaattaaacgactcagtgtcttttaaggtggtcccaaatggtttttaataagtaaaattgaagtcctatagggacaggagagagagaaggggacagaaaattatttgaagatattcaaattttgaacattttaaaattatgttgaaaacagcagcccattgattcaagactttcagtaaataccaaacaagataagtataaaacacatacacacccctaagcacctcatagtaaaactgagaaaaatgtaaagtcaaaggtaaagaaagaaaatcctaacagtcacagaaaaaggcaattcatacatcagagaacatgctacaaatgatgactgacttttcatcagaaacaataactagaggacttttttaagttctgagagagacagagactatacatacaatactctagtccacaaagcattttttaaagatggtggtaaaataaaaatacttctagattttaaaatggacatgcatcgcaagaaatgtcaaagaaagttcttctggccaaagggaaatgatatctctgggaatgaataaaaatatctacaaatgatatatggataaatacaaaaatctaactttttttcaaaatttcatttatttctactatttaaattaaaatatagcttaaaaatatgaagaagtgaaatatgagacaataattgcataaataattgaggtggcaaatgaaattataccagtatattatgtttcttacattttgcatgaagtgacacaatgttaatgatagtttatgataaatgaaaaatacatattgttatacttaaggaagccactaaaaatatatcaatcagggagagctcaaaagcaaatagaggaaataaaatagcatgctaaaataaatgagtgaacacatgggtaacaaatattcagttaacccagatgaaaacagggaaaagaaaacagaggtacaaagagtagacgaaacaggtagaaaacaaatagcaaaactgtggacttatcacaaccatatcaataattacatcaaatgtaaatgctaaagggtctatttgaaaggccttttcacgatagattaaaaccaaataaaaggaaaaaccaactatttgctttccacaaaaatacactttaaaagaatattagaaggcagaaagcagttaataaaagtaaccctggaataattttggataagtattaagagcttttatcactcaggattcttagttgcaagcaagagaagtcgtcactttttggtttaaatggaaaggaatgtactaaaagatgctgggtagttcacagataccctgagagagccaaagaagtaggtttggagtttgtgcagccaggcataatgccccaaagtagtccttagatgatacaactatcatggctgcttggacatggataccataggttgtactaccagtgccaccagctgtggccctgggatgcttctaaaaccattaactgctgcctcctggagaatggatatagctactactctctagtaccacttgccttccttttgttactaacaccttccttgtactactattttaattcaaagtctggagtgcgtgtctctgaatgacagagctcagaatatgcattctagcatgtcttagctgctacagattctgggaaagtatttgacattttcagtatctataatgagaagaaagctctgactcataaagtaggcaatattttcccaacagggaaatggaagctaaaaatatacgacgaattccactagagattaaagctttgagtcagatactcgacaactttactatgtatgttgtcttggtaggatgagttttttttttttatgtttttctaagcattgggtttctataaaattgtaagtttcacattgagtctgttatgattaaatgagatgacaattaaacatttattacagaatcttgcacagaatagatagttacatgttattattacatataatctagtagtataattgttactgaaggagatatcttatcagcaggaaatggagggctggtttattagaagaattattaatttggttttgacctcattgagcttaggatattaaaatatataaaagttaaaatagatcacaaaaagatgctggttatagcagtcagggtctccagatattcagtattagagatattaattcttcactttgtggtagtaggtaaatatatgggaggcgcttctgtgaaattaaaccatgtacattttccttttgcctgaaaggaccaaatcaacagctaaagagcccctttacttcctgattaagatttagatcaaatcataaaaagagaatgaagattatacatattttatgtcctggcctctatagtagtgattaataatttttcatgccccggagacaaagtggaactactgttttataggcatgtgcagaaaggaaataaagtacccacagctgtaatagaccatgttgttggtcagaggttctttaggagagccttttgttagagaatggtttttgattaaatcttagatttatttagaattgttttctcagatattttgtgattgtttttctcatagaaataatgctacattgaatggtaattgaattttgggtacaaataagccacttattcatgtgtgatgttgtgcatttgtaaatagtctgcgtttaggaaggatttttaaggtactggtaggtggttatttttaaaatactccctaagttaggaaactctctacaagattgtaactgcaagctgctcatagaaatttatttcatgccaaaattctgctgatggtgttgatttcaaacacagaagacagaaataataaacttgaatggataagagctgtctctttgaacttgagctacaggaagccactggcatcatgatctttttaaagagtggctctgggaattatttcagaagggctttttcatgaccaccttgacttccaacctttcactatacgtgcctcatttgtactgttcctcctggattcctcagcaacttctaatgggcctcttttggtcttgtttctacccacttcaatccatcctcttcccttcagccaagggggaaaaaaatctaacaccctaatctgaccgtgtcactcactgcttatacctaaacagtaatcccttcctgcatagtgatgtcaccaaagtgtggaaaatatgcagaatttctttaaggggacacagtattaatcatcatcagttcacatgatgagaacactatttcttttgtgatattttcctcaggatcttatcagagaaattgaaaatcttagttttgtgctaatacaatgttcaacctccctatgagttatttgtgtccccttttaactaaatgggagcaatacccatgttcagagtcattatcaaataacagtttttagctagaatttaatagcattatttttgtttaataacatcccccaaaacagccatgacctttgctcttgaccagttggcttgtgttttagctggagcacttccacctcttggtagctattgctttgattgtgcttcgtctttaggattgtactggttggccgggggtggtggctcacgcctgtaatcccagaacgttgggaggccgaggtgggaggactgcttgagcccaggagttcaagaccagcctgggcaacatagcaagaccccatctcaaaagaaaaaaaaaggattgtactggtaatgctatgtttcatctcctgttgtgattattcaaagaaatgcctcagaatcttaatcccacttgtttaaaatgtgcattgaaagccctgttcttgtctgcagctgatctgggtacaatgattttggcacacattgagtgccaaaatcaattaaagtttgctcagctttaatttttccatcagaattgtgcaagctgagccagttgagatgtctgtggtgttggctattgtctgtgccattaatcattggtcctcttcaattagggcatgtacgagaggaattttttccttacaaattgaggtggatggtctactgctacgggctttgacttccaccttgtcttgttccttcttaaaacaagttatcccttcccaaactgctgatttcacgggggcattgtccccatgaacttttcaaaaagcatcaatgagttcaccatctttcactcaagcttcattatcaataagatggttcctcttgctttaattttagcagatttcatttttctctgataggggctcttttaaaatggatgtcttaccattcttagtgcctcaaactagattctgtttaggtatgttctaacaagttagtacaaatttaatttggtgcaaaaacattttgaaatccatgtgtattccttcacaatatacattttcatggcctttttgaaggcccttgatttaccttgatttatgacaggttatgctgactttccatttggggaataatataatttttaaaatttatgtataaaatgtaataatttacaaagagatatcgagtaggcaatgttacagagagttaacgatatggcaaaagttgtaaaggaaataaactgtgaaatttaatactgcatgaatatagcaagaggttgcaaagatagccttcacatcactgacatttagaaaaaactgagctatgtggaaatgtccaagctactttaaatttagctcttggctgtagcccaacattattgtggcacagctcctcatcactgccttctgcctggctaacataatcccatttcccccctgtatccattagccatgccctttaggggaaacctggtgaatcttgactggcccaaaccaattgtgatatgatccttctctttctgggtgtctggttcaggcagtagtatgtaacccaattctatacagagggacacaagggctcatgtacttggatggtttttgtcaacttaggggagttttcctaatttcccctggatatagctatgaaggaaagaaatgcctgaaactccaacagtcatcttgagactcaggaatctaaagccagagcacaaccccaatcacctgaagatgctaggacagaaagatggtaagaaatagtgtgcaaagacagttgggacaccaaagtatccagtcatgcagctgccctatctccagatttcttgttcaatgaaataaattccttattgtctaatcccgccatgtagttagattttgtttttttttgacttgcagctgaatgtgtctcacatgattcacgaatctcttgactcttcttgcctcatgacttcccctccggaagagcatctacctttcagtcctccagccctttaggatatttttggcttctgagttttttctcaagtggcttcctctgccgggaatgccatcttccttcctctcgttgcacatggcttgatctttaaaaactcaactcagaagccacctcagaagcctttcatgatagaacttagtgagtaccgagtgctcagagtctttactgtgagcagtcagtattcactaagctctagcactggctcactttactctgagcactcagtactcaccattgccttcttatacaggctgtgattttctaatggtgttcctgtttttctctgtacactctgctacttaagtataggaataatctatttaacttggtatcccaagattctcattacgtctttgggcaggaaagattatttgaaatatttatccaaaacagttctcccacagagcagtagagtgggtagccactgaaagctagttatttgaaactggggttccaaacctgattctgtttagcaaagcaacacaagcatcagtttccttagctggaaaactgatagaaccatagtatttacctcctatgtatttaaatgatataatgatgcacgtaaattacccatttcatgataaatttggtcattattcacaactcacgagctttccccatgagtttagctgtgtgcccagagacgtgataaacaagtctacacttaaaaaaaatctgctattcatgcctgtctctagttcttggtgtaagaatgagaatctccagcccattgacattgtattttagaaccttacacttaactcagtgcatgcctcttgtatttgagaactatgcttcatctggtatctaggccacaaatgcacattgtttaaagcaaaaaacaaatgttcgtgatgcttgatgcataatttaaccttttcatcatttgatgtgaagtctaaattaatctaaaaggatgatattcatatgagaaaaaatgtttgacctttaatgatactttcatttcttgacattctttattcatcctggaacctgttgctaattttaagtgactccctttcatgtatgttcaagtgtggttttgaagtataatttgaaaaagcaagaagcagagaaaaagtggagggagagtgggcagagggaggtaggaagggaggaaaggagaagtggtgaaagataaaacctaaatcttcatcaataagtgaaaggctgtttgaataagttgtaagacatccctatatgaaatattatgcaagtatttaacaaaatggtttagatctttatagattcacctgaaagtattctgtgacatattaaataagaaatgcaggttacagattagtatgtacaggatgtgcatgtaagctatatacattctcgtttgtatgagccaaaaaaaaatgtgtggaaggagagacacaaaactgtgttgtaatattggctttcttaaggaggaaggagacagaaaggtttaacatttcctccatatctataccatttgactttctgtaataagcatgtatttaaaaaaaaatctttattgaggtataattcaccataaaatctagccactaatgtgtacaattcaataatttttactaaatctaccaagttgtgaaaccatcaccataatttatttctaggacattttatcacttcagtaaaaagcctcgtacctcattacaattaatgccaattcccaccctcagcctcaagcaaccactaatttactttctgactctacagatttaccttttccagacatttcttagaggtgaaatcctatgatatgtggtcttttgtgtgtggcttccttcacttaccttaatgtttttcaggttcatccacgttgtagcttgtatcagtaccacattcccttttatggttgaagcatgttctattgtatggatatagcacagttggcttatccattcaccaattaatggatgtttggataggcttgccagattaaatacaaaaattaaatgccccatttgatttgtttaatttggcccaaataatttggaacatacttacactaaaaaaagattcatttttttctgaaatttaaatgtaatcaaacatctcatgtttttattcactagatttggcaaatttgaggtatccgctttttgactattatgaataacgctgctgtgaacatttgcatgctagtgtctgtatagatgagcatgcatttttgtaaattgaaaaataagcttaaacgtttgaaacttttataaataatatgcttaaaagtttttttaagattggctgggcacagtggtataatttcaacccttgtgaggccgaggcagaaggaaggatcacttgacgtagagttcaaggccagctctggcaacatagcgagacccccatgtctacaaaaaaaatttttttaaattatatgggtacgatggtgtgtgcctgtaatcccagctactcaggaggaagatttcttaagtgctgattgtgcctctgcactccagcctgggtgacagagtgagacctcgcctcaaaaaaaaaaaaaaaaatagaaataaaaaataaataaataaatttaaattaaacctctttttttttttgagtggatgccaatagtaccagaagtttacaagtcagtaaactagcttaagataatgttaatgaatctgttagagaaaatcacataaatattagcttctgctttaattatatgccaacatttcctattatggcagttctatgctgtcttgcattgttttattacttgccggatcgcctatggttatttaagaggatcataaaacttggacaccaggcatgcttgacatctaaataatctaagtccagctcattaaaagctgagatcaatagcttggtgaatactttaccacagatttcttgccatttagttcaggaaaatgttagattttcagagaatgtgattttcccttcttgctgttaatatgtttgaatgaagttaaacagagccagcagatccccaccccatgcttttgacctcagtcttctctgggcctaaaacactattgccctgacagttgcatggtttaacttttatttcattcaggtctctgttcaaatatcccctcatcagagcagcctttcataaccacccttcatagctagggctgacccatttagtaaataaaatataatatggctagttaattttggatttcagataaagagcacataattttttagtaaaagtatgtcccatgcaatatttgggacacacttataccgaacaattattcgttgtttatatgatattcagatttaactgggtgtccttaattttatcgagcttccctattgataatgcctagagcaaccagacaccatatcatataatcatctgcatatttattgtattggtggtctcatcctgagagagcatggccgtattagttttgtagggctgccacaacaaattgccacaaacttgatgactgaaaagggcagacattttgtcacagtctgaaggccagaaatctgaaatcgaggtgtcagcagagccttgttctgtccaaagactctagaggagaatccttcctgcctcctgcagcttctggtggctcctggcattattggattctggcaacagcccaccagtatctgcttgagtcttcacatggccttttcccctgtatctctgcgtgtctttcatctttctactgcttataaagacaactgctattgtatttagggcctactctaatccagaatgatctcatcttgagatctttcatgttgttatatctataaagaccctttctccaaataaggtcgtatttacaggttttgggtggatatgttttttgagggagcagtattcaacccactgcagtagcacataggagtttgatgaatacgtgttgaatgaatgagttggaaagtcaatggaggggggcattttggggttcatttctattccacaacatccactgggaatctattgtatactgatgttagaaggatgctggggatacatttctgttttaaggtttctgagggatacctaggtggacatgttcaaaagatagctacgaaattgaatttaaaactatatcatgggcatctacagcatataggtgacaggtgaggcatctgaacctctgcacagagagatgggagaaagttctagtaagtggggctgagatggcattccagcaagcagtaaccacacagtagtaaacagagaaggagagacaatgagcagagataaattcatgccctcatattcctttttttttttttttttttgagatacgttcttgcttttttgcccaggcttgagtgcaatggcacagtcatagctcactgcagcctcaactcctggactcaagcaattctccagcctcagcctcacaagtagctgggactacacaggcatacacccctacactgagctaatttttttttttaatttttttggtgaagcagtgggtctcactatgttgaccaggctggtcttgaactcctggcgtcaagcaatcctcccacctcagcctcccaaagtgctgggattgtaggtgtgagccactgtgccagcctcacgttttttactccaatgccatgagcccatagtctctgttgttgacagacagagaacagctcaacagccaggagccccgagcacagaagccaagagagagggtttatcaagaagttttacttcctgctttggaaaaattcttttgacgcctgttcaggcttgagaaacccataatcaaattttcttgctgcttcttataaactggaaaccaaacagacatttcaggagcctaattactataagaagactgtttctgaaatcactgcaaagttttaccaacacagccatagtgctagggggaaacacagcatgaaatgatgttagaaagatatttctataatttttgacaaacatttccaaatgaatatgaatatcatcctttccaaattaaccactatgaaaggctcatatttccgaggctgttaccagggactcagggcctgggcagtagcacaaggccccattctcagagggccccatattgaatgctatattctcactattttccaattatcaataccttttaaagaaagaactccatattgttattttgtactgggcctcacaaattctatagttgttcttatgtcagtgttgagctttttcaaaattatttggtatttctcttagggtattttctttgggcaagggaatgagttttgttgaattgttagtataaaaaatataaatgttggaattcgtgggattttacttcaatgccatgagcccatagtctcaaacctcagcattgctgcctactagctgtctctgtatttcagcctaagtttcctcatctatgaaatgtgactgataatgtctatctcatggggttgtggtgaagattgaatgtatgtgtggaaatgtgtaaagccccgtgtccttcggtgcctgacatagtcggagttcctacatacgtgttgtccttagatatctgttaagacaggtcgaccaaataaagcctccagtgacatgaacagccaacctttattcagcaagcatttgctgcacgcctttattcagcaagcatttgctgcacgccagttgaataagcaggtaagtccctgaacgtagggagctttccttacagtgacagggaaaagactataaaacaagcatgcaaatatataaacaacaggattccaggaaataataaatgagagggaggaaaaagaaacagcttagaaaggtagcgtgggcctggggtagggctcagggggagcacctttggatatgaggttagggaggacctctttaaggagataattttgaagcaaagaccttgtagggtgatggaaagaaccaatatatattatggagggaagatttttccaggcctagggaaccagtgtgaaggtgttgacgtagaaaccagttcggaaaacttgagcatctctttttcataatcttagccagaaaaactgcagcaaaacttgctcatgcatatagggggttgacttaataaatgtcatctatggtcccttgcaatgtaccatgaactatgctgagggaagagatacaaaaatgaacccatcatggtcacatccagaggagctgaaatataatggaggagacaaatgtatataaataattctgtaaacaaataaaggatggggccgggcgcggtggctcaagactgtaatcccagcactttgggaggccaaggcaggtggatcacgaggttaggagattgagactatcctggctaacacggtgaaaccccgtctctactaaaaatacaaaaaattagccgggcgtggtggtggtcacctgtagtcccagctactcgggaggctgaagcaggagaatgctgcgaacccgggaggcggagcttgcagtgagccgagatcgcgccactgcactccagcctgggagacagagtgagactccgtctcaaacaaacaaacaaacaaacaaacaaaaacaaaaacaaaaaaagggatctggggagcatgaaataaagtatttactaatgtcaaaacttcaaatatgaatgtgatttttatggggtgaaaaggtagctttaaagttctttcctagggtgagattggtgagattaactttctcaagggtttggggtaaacaaaatggctggagaaaaaccctttgagaatcctgtcctctcagcatggtcaagtgtaatttaggagtgaggcgaaggagacaaaagattaatgcattccaaaagtatacatgcaagtttgtataagtcagaaatcagtggaagtcgctctgtttctttttttttttttttttttttttgagacggagtctcgctctgtcgcccaggctggagcgtagtggcgcgatctcggctcactgcaagctccgcctcccgggttcacgccattctcctgcctcagcctcccaagtagctgggactacaggcgcccgccactacgcccggctaattttttgtatttttagtagagacggggtttcaccgttttagccgggatggtctcgatctcctgacctcgtgatccgcccgcctcggcctcccaaagtgctgggattacaggcgttgtttcttaagataaagatgaggttggctccagctcgtcacatgcccgttctgcattctgcagaaagttcctgtgctctctgcaataattctgtaaaggagttgtctcctgttccatgtccacatttgcactcagcttctttccacagatgttgccagagggcctgttatattgagaacctacatcagccagcattctccaaagaaagagaagcaataggaccagtaggatatatttctaccacaaccggtttttagtaggatgtttcccaaatcctggttttaattatttttgtgtctatttatcccatctattcctctatctctgtatctctatctatgtttctatcatctatctccgtatttgtagatttatgcatgtatccatctataatttgtcattcatcatttataatagaatacctagcattgttttcgtggaattcagaaaagcatatagttgtaaaaagctggatatttgcattactgatttctataatttacataataaattacaactacaaatatatttatttataaatatacaatatacattatacattgatttatcttctttatttttttatgtttagtaatcttatggctttagatttttttattaaaaacttttgaacaatccccaatattaaattttgcattttcttccttttgatgaaacaaagttgataaacaaaatgaaaatgccattacttattgaaccacaagatagaaatctccactcccacaagattctggaattgaagatttagttcagagattgtttgctccaatacattttttctggagatgttatatgttaattttttaaactgcagctgcgaaacatttactgctctaagaaattaacaggctgtttacttttaaaataaggtgtgaccccagtagtcagtaagattaacaaatgagtttgcagttatcttctcagaaaattaaccagagtgacagcattaacacacagaaccttaccattcacagagtcgagactcattttcaatttcagaaaactcatcatttccttggccaccacatttttttcctcttaaagtagcatttgccaaacacaacattatctgtatttatacttaggttaactggtaaagtctagtcatcttgtctaatgaaacttgtttaaggggaaattaaattattgaattgcaggtcccgcatctcactctgatactgattggcatagtaagatcgatgtgtagcaaaaatgtcttcatcaattcctgtattgactttattattgtattatatagtacaagtttctggttaatatgtttttataatttgggataacaggatttgattgttaggtataatcagatatataatggctatatccaactgaatttaatggagagataccatatttgtaaatgtgaaaactcaataatgttaggctgctcattcttccccaaataatctattcattgacattttagttggaatgatattgaacaagattttttcagtgaacctaaaacatgtattatagaattcatttggaagaacaagaaaggtccaaaacaactttgacaaggagaagaatttactttacctgttatcaatacttgtgacaagatatagtaattaagtagttaagtcaaacagcttaatggttaaactttccaaaatagttcttgcatcctatttatgtcttgggtgctgtaaggaatacaaagacatattaggactcaagggcatggatagagcagaaaatattttgaagtggtggacattgaagcacctgttatattctcccttataaatgacattagttcctggatgaataggactaacctaagcttatcaagctgaagagtgatgttgataccaattagattttctgtgagctggaaggggtagagaaagaccctatttcctccattagctataattcttaattttgaacaaataaaggtgtcctaggaaaaatccttagactagcactcctcttatcaccatcaatagaaaatgagccttatttggcattttaggatttttttctctcccctaaaagggagccccaccccagaagtactccaggagttaaacacccagctgtgttctttccttctctgagatcagcaatggccctaacaggtctagcatttgaatttagctgacaattgcagtgatgatgtgttgagcagaatgcaatccagcttgttcctgtgcagttttataggctctgcaagttttaaaacttagaaaaaatgttttgtcagtaaaagaagctggcacacagggaacagttgattgtataataaggcatcatttcccatggtctaataactataacctgttttaactattacacattataatatcaataaagctctggtcatttattatctatttaaaaaatcttctttcagtaaagatgttctgaaaaggtcagagctgctgtcagaccccagtgataaagaacaggatggtgctttgtaaaatggcagttcttgcagtgttaaggactgtaaactttttaaattgaattgtaaaagtttataactaataaagaaacccttttaggtgattttaatgttatttggtcgtttaaaatatcccacagatggaaacagatagtaaggtcatgaaatgggtgagtattcagcatcataaaatgcaaacacattttctccatgttagagatatagcaatgtagtcccgataatgctgtaggtcattatctagtttctactaagatcagttacatcacatgccaatataaacagaggaggggctgaggcttctgtttttagaaagggacttagaacagccaacagatcttctttgggtaaaataaataaatgtttctcattttctccttcaaatgaccttgagcagttcatctcttgggatggctaaggtatagttcaccttaaataggaatgaaaatttattattaccaaaaggtaattttataaaaggatcacattccaggaagaaaaccattagactgaaaataccttgagggaagctactcttggtctttcatttcagaggcaggcattttttctagacacttaggatctatcaatggaacaaaataggaaaaaaatccattttcttatagaaattacattgaagtaagataaatcaggcaaaaaaagctatatgtaagtaacttactatattagtgcatataaaattgtatgttcaaaaatgaagaatgtcaaaaggaaaagaaaataaagcaggttaaaagtgatcaagaatgctgaggtgaagagtgtggtcccctagaaataatccctattattttaatgtgtagcctactgatctttcttttctttttttacgatgcatacatatacatatattttaaacaacaaaagtcttgatgaatacatggcattgttactttcttttattcgatcagctgaccgttttttgaaaatgtaaataaatgaacataatagttatggagatccttattgagaagagggtatttgggaaatgacttgatgggagtgagtaatggacatgtatatctggatgaagacagttccagagagaagaaagggctagtgcaaggacaccgaggtgagcatgtgctggcatatttgaggagtgggagaggccactgtgtctgcagaggcctgagcaagtgagaaggaaaaggggaggagagcagagagggaatgactgggtggtattgggttatttaggacaataaaagccactgtcaggaccttggatttcactgtgagtgaaatgggatgacttggagggttttaagtagacaaatgacataacgtgacttatgacttaaaaagaaccttctagaaactgattgaaaatacatcattagcagacaagggctgatgcagaaagaccagttaggaaacaatcctggagaaatgagggcattcagaccagcgctgagtgttggagatggtgagaagtggtcagactcaagatacgtttgaccatagaaccagcgagatcttctgtagattatatacagattgtaagaaaaaggaatcagggatgcctcccaggtttttggccaactgaagggatgaagctgccatttcctgaaatgggaagtctgtaggaggaggtagtttggtttccattttggacaaattgaattcgagatgcctatatgtcatccaagtggagacgccaagtaggcagttgaataattggatgagtctagaatttgggagagaagtctggactagagacatgaaattgggagttattaatatatatgatatttaaagctaaatatcatatgatctatggtatttaaagctaagagactggatgagatcactaaaggcatgagtatagatagaaaaaggaagaggtctctggattgactgtgactagttttgactagctcgataaaatttagctgagtcaatgaacaagatgaatgagtcataatagcaatcagtgcactcctccacaaaatgatagtgcagataaaaagcactaaatgtgtaattcatggaagtaacaacatggagtgattcctaatttgaaatgtgaattcttctaggtccaggatggaagtgggacccgataaaggtcaatgtgaatgcagaaagtaattaagactgtgccatatttgtttactcattcatttaacagataattttaaaatgcctgcttggtgccagtcactaatcttttaatactgaacatttaatattcccccccaacattagttccttatttgtgagcatctcgatttccattcagacattacttctccagttgtgtgcaatccttaaaccagaagctgggaagtcttggctacagtaatcagacaaaagaaagaaataaaaggcattcgaataggaaaagaaaaagtcaaactatccctcttcaccaatgatatgattctatacctagaaaaccctgaagactctgccaaaagtctcatagaacagataaatgaattcagtagtttcagcatacaaaatcaatgcacaaaaatgcacaatgttattatccatagcatttctatagataataacattcaagctgagagccaaaccaagaagacaatcccatttacaacagtcaaaaaataaaataaaataaaataaaataaaataaaataaaataaaatacctagaaatacatctaaaccaagaaggtgaaagacctctacaaggagaactacagaacactgctgaaagaaatcatagatgacacagatagatgaaaaaacattccatgcttataggttggaagaatttatattgttaaaatggccatactatccaaggcaatcctatttaatttaatgctattcctatcaaactagcaacattatttaatgctattcctaatgctattccaatactatccaaggcaatcctatttaatttaatgctattcctatcaaactagcaacattatttaatgctattcctatcaaactagcaatattatttttcacagacattagaaaattatttagaatttattctaaaattcatatagaaccagaaaggagcccaaatacccaaagcaatcctaagcaaaaacaacaacacaccagaggcatcggattacctgacatcaaactatactataagtctacagtaaccaaaacagtatggtactggtacaaaaacatagatcaatggaacagaatagagaactcagaaataaagccacacacctacagccatctgatctttgacaaatgaaaaaaataagcaacaaggaaaggacttcctattcaaaaattgtgctagcacagctggctagccatatgcagaagaacaaaactggactcctacattttaccatatacaaaaattaactcaagatggattaaaatttaaatgtaaaacttcaaattataagaatcctggaaggaaacctaggaaacaccattctggacatcaaccttaggaaagaacttatgactgtcctcaaaagttaattgcaacaagaacaaaaattgacaagtgggatctaattaaattaaagagcttctgtacagcaaaacaagctatcaacagagtaaacagacaacctccagaataggagaaagtattaacaaattatgcatccaacaaaggtctaatatccagaatcaataaggaacttaaacaattaaacaagcacaaaacaaacaaccccattaaaaagtgggcagaagacatgaacagtcacttctcaaaagaagacacacaagtggtcaattaaagtatgaaacaatgttccacatcactaataatcagaaacatgcaaatcaaaaccacaatgagacaccatctcacaacagtcagaatgtcaattattaaaagtcaaaaaacagcagatgctgatttggctgcaaagcaaagggaagggaatgcatacactgttgataggaatgtaaattagttcagccactgtggagagcagtttggagatttctcaaagaacttagaactaccatttgacccggcaaccccattactgggtgtatatccaaaagaaagtaaattgttctactgaaaagacacatgcacttatatgttcattgcagcactattcacgatagcaaagacatggaatcaacctagttgccgattaacggtggattgaataaagaaactgtggtatatatgctatctgtggaatactatgcaggcataaaaagaaatgaagtaatgttctttgcagtaatacggatgcagctggaggccattatcctaagcaaactaaagcaggaattgaaaaccaaatactccatttttctcacttataagtgggagcttaccagtggttacccatggaggtaaatgtggcaacaatagacacaataagggaggagtttcaacaataggcaacagtgagggggagggtggcgagcaagggttgagaaactatgctcactacctgagtgatgaggacatttgtatcccaaacctcagtgtcacaaaatatacccatataagaaatctgcgtatgtaccccctgaatctaaaataaaagttgaaattataaattttaaaaaaaagcaaacaaacagatgtcagtgtccagaagccaagtaccacactggcagaagaccaggcgcgtggcctaaacttggccaagtggactcttcataccagaagtttggcttttcagcaaggaaagagacgtgactagtgaatgggtcaaaagacatataatttgtgtcacaaatgtgagccacaaatataattttaaatttctaataactactataagataaaagaaatacatttaactaatttaaattatatactttacttaacccaatgtatccaaaatatcatttcaacatgtaatcattataaaaacgatttacgagatagtatatgtataacataatagcatacatacacacatgcatacatacttgtattaatatttttcagactagccatatttcaatgcccaattactgcatgtggctggtggttactgtcttagagagtgtagagttagagttcattcatttcagcagctgctccctgaacaaacaccatcttctacaggattatccaggaagtcctcctttttatccttttggagctgccttagttcttgcaaagtcctatccacgttgtccagtgtcctgagaggagtgagtgagtgagattccagtaggttctaacatgttttgaataggttgattagggtaactttgtgttgcttgcaataaaaaaaaacctaactgccttactccttttccagtggaaaagagagggaatgtgccctggatcaagaccttttcccaggcataacatcaaggttgaagtcaaggagtagaccaagcattctttaaaaagaaaaacatggacctacctatatttagatgagaaatatcacagcaatatagctttaaatggaaagcacagagtttcataaaatgagtatactgtgattttatttgtatacttttttcaaaagcacacatttatttatatttgtggacacatacctacaattttgaaatggaaagaaatgaacaacaatgacctttagagcagtggtccccaacctttttggcaccagggactggattcatggaagacaatttttccaatggagttggggctgggagatttgattcttgtaaggagcaacctagattccttgcaagcacagttcgtgatagggttcctgctcctatgagaatctgatgcaccgctggcctgacaggaagtggaactcaggcggtggtgctcgcaagcctgctactcatttcctgctctgcagctcggttcctaacaggccatgcactggtcgcaccagtaccagcctgcggcctgggagttggagacccctgctttagagatcatgaataggcaatgggaaaaggcaggtgttatgggctgaattgtgcccccacctcaaatttacatgttaaagtcccaaccccccaacatctcagaatatgatgtttggagatggggcctttgtgtaagtcattaagcagtaggttctaatccagtatgattggcgtcctgatagaagaggaaattgagatacggacatatgcacaggaagacgatgtgaagacacagggagaagatagccatcttcaagccaagaaaacaggcctaaaacaaatccttccccatggcactcaggacaaaccaactctgccaacaccttgatctcagacatttggcctccagaaccatgagaaaacaaatgtctaagctatgcaggctgtgagattttatatggcagcacagtcaactaatactagggggtagctaacaaggtagacttttacttgttatttaaagtctttggttctgatattttaacaatgtgtacttctatttaaaatcaggaaattgaggccaggtacggtggctcatgcctgtcatcccaacactttgggaggctgaggcaaaaggatagcttgaggccaggagtttgagaccagtctgagcaacaaagcgaaactcaatctctaccaaaaaaaaaaaaaaaaaaaaagagggaaaacactagcatggcacagtggcttatacctgtagtctaactatttgggaggctgaggtgggaggatgtcttgaggccaggagttccaggctgcagtgagctatgatgatgccagcactccagcctgggcgacagaccaatactctgtgtctaaaaaggaaaaagaaagtcaaattaaagcattaaaaaagagaattcaaagtcctttctcacctccatttggcctgctccttccttccttctttcttccatactcccttgaaattttgccccacaggacgtcatggatatttccaaaaggagggtgcttcctaagtgcttgcctctgagtggcatttgaggtagaacttatgacataattcttcttggtccaatgtaaatattaacatacttccctaccctacatgtctaattatggttagcctatgattttgttggaatcagactatggacttatctttgtttacttttagtatttgtttttatcctgttcattattatacttctctgaagttccagatctgaaactgtttaaattatgggtctttggtggcaagcaagagaaagtgtatcttgctctcttaagcagaaaaataattcattcaagggaaataagggacctaaaaggatccaagtgaaagccatagactgaggtttggaaaaacacaaggagcaaagaaagctcacggggagagggggagttacagccagaactgaggggctgttactttaggatgtcagcgatgaagttaatcagcctatgatcttttttgtttctgtgtcatttccttcaagattccacactcaaaggaaacagcgttcaataagcttatcttgggtcatggccagatcccttaaccagggaaaggaaggacactgttatttctaccatattctatccagcagggaaagtacgctcattgcagagctgactcagtgtacttttaccagaaaaaggaaaatcctaactagcaaagattacacaagattcctcttagataatatttggtttgcttattccacactgtaaattttctgaccagtggtagtgttctctaggaagcgcttcatatattgcaatctccccaagaacagggctggatttatcattttcttgagtgacatataagacaataagtgattaatagatgcctagagttataattcaaaataggtttcattatgttttgccctgataactttctttatacttattgtgtggttttcttctctaggttgctataaatttggtctccttgttcaaggtagttgtcactgtgttgaccaggccttgcttcttaactcaggtaattgaaaaatctatccaacatcctcatcagcagaaaaaaaatgtagactgagagagtatcttccttttgtctgtgtgattacagacttaaggaaaatttgcgttaattaatctctttataatgcacattataaaacaaatttcctaaagtgtggaattatttaagttacatagagttatgactcaggcattggattttattaacaccaatggcatattacattgatttggtgtatagtcatgaagttactatttatttttacctaattaaaatgttaaagtggaggggtctggattttaatcatattcctcaaaagctactttgatactggataaaatgtcagctctcgaaatccacaaacctcattatcctcattgtaaaaatcagatattccagatgttaaatatatatcagatgagaaaggatgtgggtaaacctggtgtcagagaaaatgtggtaagcattccctttcattcctgcctcctcatttaatgcctatgccaggcagaagaaaaagcagcaatacagaaaaaacacattatttaaactgaggtctgagttcaaatgtggattttaccatatcctagctgaatgcaagcaaattactaaaattctcagaactttagttttttcatctataaaacatggctaaaaatgtctatttcttactgttatcattaggatcaaacgaaatacttgatatatccatagtgagtactcaataaatggaatctattataatttgacaactaacatatttatatgagtcttactcatttctatgcatgaaagaaaatacacgtttgagacagattaataattacttgtttgattaatctgtctagatctattttttcaaatgaatatgaaagttgtgattgataactggagcaaatcatataatccatcatttcctaaaacatttctagggcacacccatgctgtcagatgtaacaaaatgggttatcagaaaaacatttgcgttcatacgggattagacaaatcttgattgaccaatgtcaaactactgtcttgactgcaggacttttcagagcctttaacatacaagcatacattgtgactttccagaagcaaatagagtaagcagaattttttaacttatttgaccaatgagtacattatcgtgggggtagggttattcagacaacattatgaagaagtgatgacatcgctgtttttcacaatctacttgcaaaatggcacaagaaatgatcacagcagacaatcaaacttgcccagagcagccattgtgaatttaatctaattgctcttgaaagctggatttgtttctctgaattgagttgcagcctttgaggaagaaacaaattgcctccccactgctcacacttctgctccatctgtaaatgttaggaaatagcataaaaagaaattcaaattcctgtagcagtaaatatgcaaacacacattttctgcagatatagcgagggcatcattttcccccttttaccaccccagagtccctgaacaggtttgaatctgttgacaaagctttttaaaaccatctagctgacctttattttttatttttatttttatttttatttttatttttatttgttttgtatgctagcaatctgttaaccacatttccagggaacttgcatagagagctccttctctctctctctctctctctctgtctctctctctcccgctttctatcctactcccttcctccttccctgccttcttcgctctcctttctctctcttcctttttttctatttcttattcgttggcagtcttgccactggatgtgcaaattaaaactcatttaatcatctgcatgccaagcacaaggactcagtcaatcacgttctatgccattggctaggtaattacttgaaatttgctatctattgtttcatcctttgttcccagcctactattgacgtcagaggagttttgcctgtgaaagaatgaggtcttatttttgtgtgtgtgtataaaatattctagtttgctccagacttctgtgcccaagtgggtctctggcaaagaatgttctgtacatccatcaacatttagaagtgcagtgatggttgcatgcaaagtggaagttggaaattgagcagaaagaaaaaaccttgtggagcgtagtcaaaccggttactcaaagcttgtgttttaagattttcttcagcctcttgcacactcataccaaacgataatatccacatttgcagattgagaaaccaacatcgaactactatcttaattgcaggacttttcagagcctttaaagagagatatagttatgtctttgtccttatgggaataaccggacctttgccaaactgagaaaagttcaggcacaaggtagacaatgtagtggatagtgagtcagattctgtaccaggaagattttgtatggtgtgagttcctctctgcactgcccaccttggtacttccagcatctaggataactgttgccacacaattaagtatttgttaactacttgtttaaggaataagtaggtgtttttcaaagaggctgcttcaaccatgaacacttatttatctttggagtcacatgtcatggctaagttatgccctaagtaccatataacttagtagttaatactgtagttaatacttagtagctaatactctaaccttgaggttagaaagccttgagggttaagctctgcctttgccctttaccactggtgaggctttgtgcaattaactgagtctatttaagcctccctctccttatctctactttggctccgttgtagagatggggagacaatgatcttcactccacaacaggttagttcatgtcctttgtagggacatggatgaagctggaaaccgtcattctcagcaaactatcgcaaggacaaaaaaccaaacaccacatgttctcactcataggtgggaattaaacaatgagaacacatggacacaggaaggggaacatcacacaccggggcctgttgtggggtcgggggaggggggagtgatagcatttggagatatacctaatgctaaatgacgagttactgggtgcagcacaccaacatggcacatgtatacatatgtaacaaacctgcacattgtgcacatgtaccctaaaacttaaagtataataaaaaaaattcagttcaatcctgataatttctttatcaaaataatttccatgtgaatcacagctttatatgtaatagaataaaatatttaacaaaccacaaaaaaaattgattaagacaaggtacataaaacacctttgcatagtacttggcatataataaactttcagtaaatattatgattaaagactgtgcatcaattggttcaatggataactctcaagtagagtagtacatgataggatgttaatagtacaaattctatataaacatttatatatgcagatactgggtccaaaataaaagtgtggcactacaattacgttgtcattgtcccccaccaagaatacatagaaacatcagggcagagttgataccaaatctcatagaaagccttaaaaataattatttcaaaatgttgcccttgatcaatggttctcaactgcaagcaagtttgccccctggggggacattcattaatgtctgaagacatttttggttgtcaccactggggtgggggctgtgcctgtggcttccagtgggtagaggccagagatgctgctaaacaacctgcaatgcacaggacagcctcctgcaacagggaatgatcaattgtgtcagaattgagaaaaaccttgctcgggattttttaattttaaaaatatgtaacttatttcagattctatcagagccaatacatatgaagatacattatttatgaattattttcagtgtttaaaaggggattaaggcaagtggctctttttggttgagaactgggttcatttcagggagcctggaatatgatacttttcttggaatgcatttgccaggctgaaggatcagggcagagaattgcagtctgatgaaaatgctgcaagcaaatatcctgcttagaaatgtttttgatgagtcatttccaaaaactcaaatacactgactagtgactaagagtctaattaacccagacgccactaaaaataggaaagatccattgcacttacgcgaggttttctgttaaatcaacaaccctgtgaggtaggcagaagcaatttaaagtctagagaatactaatactaataatgagggctattaattattaagcatggacactgtgcaaaataatggcagtagaacaagaggaggaggaacttagggtatggagtgcacgcctagccctgtcacctactagctgcatgagtcttggaggtttattttgcttttctgcatcttaagtcttaatctgtgaaagaggaatagttacagtgtcagtttcacgggattgttgtgaaaattaaaaaaaaaagcttccaaagcactcagcacagtgaccaatgcatatgcttctaataaatgtaagttaataatgagaagaattctcacaaaaaccgtacaaggaaagtattcatagttaaagatgagaccatttagagatgaacaaactgtgtcaaaaagtccttcagtaagttgcctaagttccctcaagtggtgagtagccaaatcaggttgaacacagaactcacttggcaagccttgtgcctagaagagtttctggcatgtatcagaacaacaactatctgttgcagaggcaaaggaaaaaccctcataggttctgtggctgggaccctagaaattaaacattaaaagacacgttaacaggaaaaaggatttatttcatatgcatatgaagggcctcatagaaattaaaacccaaagaagtaggcagacctggaggtgtatataccagtttaacaaaagggccaaaaaaattgtggagaaatgacaagacaaagaaaataaatttgagtttctagtggtgataaattgtggaaaggtaaacatatgaggaaaataatggaagactgggttattttaggaaggtttgttatgcagactcccctggaggctgatagtctagagtttcctctggtgattaaacacttgctgtgccctttctggtaggagaaagaggaagtggcaacattttcacaaagggaaatctatgccctgattttaggccaatgggggagggtagagtgcttgtttcttgcatctgttgtttctcaattgctttctgcttgaaatagtccttacgccaatgtggcatattttggggtgacatattctaaccccttcactactgaatgaagaaaaatctcctaatattatatcttcagtaatccacattttcagctgattttgccctgtttattgcacttccattcttgctggcttcacatttattttgtttctggtcatggagtcaactttgggtgctcaagtttccagtgggtgcattaaaatactcaaatagcataaattgcacatataactttgaaaaattgcccacagaaaaatagcaaaacgtgttcatcttttcaccaagagctaactcttgcagaagacaggtaatcattagaaacccttctaccctaatcgcgttgcctgtatgtaattattgtagtttcctctgagtattcactgaaaggtgccttgagagagaaaaaaatgtataggctgcctagcaaagttaggaaaagcatgtagaatgtatatatggtgtgtgtgtgtgcatgtgcgtgctttggtcacagatatgaagcaagtttcatcatgtaattacaatgacaaatacaatggcatttgaatcaattgacatcagaattgtaggaatggcttggagttgagctcctcctaattatatttaattgcatagtcttggatttgacactgagtctggcttgaaatggatgcttcgatgggttgagtgttttttcgcagcttgacagggttgagatgtaaacaggagctgataaacatggcacttaccacacccatgaagactttctattggaatttctgtgaatgattaatagtcaaaaattacagctccactgagctgtgacagcattggattcaggatatggagacctttgtttccgttattgcttacacattttagaatcatttgattttattctggtttattttttggctcactcctctgctgatgagtaaattgagggaaataaacaccagaatgagtctggctgttaaatgtgtcaatgtcttagccatggcaagaattctactgcattctctgatgcagttgcctgaggctgagtacagcttgggccccttaccaacaactgttcttctatcgccagactggagtgcagtggcgtgatctcggctcactgcaacctccgcctcctaggttcaagcaattctcctgcctcagccttccaagtagctgggactccaggtgcgtgccaccacgcccagcaagttttttgtatttttagtagaaacagggttttaccatgttggccaggatggtctcgatctcttgacctcgtgatccgcccgccttggcctcccaaagtgctgggattataggcgtgagccaccacgcccggccaacaactgttctttaaatgttctactatcaagaatgtttttcatatttaatttttaaaatatttctgatatctctgatattggtccttaatattctataaacatttaactatctaccttttgaactaataattccttttataatctattctacacattttgcccaaatattgtaggataaatgttaaggatgtacatttcaccattatttgtaactcatttattcatctacacatattttttgagtgcttatatattcaaggccttgaggaattagctataagtgaacatttaaatttgtttttctttctctcatgaggcttatattcttgttgagaaagatagacaataaacaggataaagaattaaaataggccaggtgtggtgactcatgcctgtaatcccaacactttgggaggctgaggcgggaggattgcttgagcccaggagttcaagaccagcccagacaacatagtgggaccctatctctacaaaaaaatttaaaaattagctgggcatgacggtgcatgcctgtggtcccagcaactcaggaggcttcagtgggaggattgcttgaatccagaaggtcaaggctgccctgagcagtgttcatgccattgccctccatcctgggtgacagagtgagaccttgtctcaaaagaaagaaagttaaaataggtaatattaaattgttagaaggcaatgaatattttcagagagtatatagcaaatttaaatatagttgtcaggaaaggccttcttggaaattgacctttgagtaaagaccagaaggaggtaagagagggagttgtggatatctgagaagcgtgtgatctaggaagagttaacagtaaggtcaaagaccctgaggtaggatagttcctggcaagttgaagaaaaagcaggaaggcctgtgtggctggaacacagtaaactagggaaaatcaaggaatcaggtgaggtcagagaagtgccaagtatctgggagggaccagagagtacaggggttgttggccattgagatgaccttgacttttatttggaataagatgggaaagaataggaaggttctgagcggagcagtgatgtgacctgacttatgttttagtcaggtcattctggtggctgagtggggaatggacagtagggaaacaaaatcctgaactggctgaccagtgaggaggccattagggacatccagcaggaacatatggcaggttgggcagggatagtgcagttggaggaggagagtcgtgctcagatctggatatatctgcaggttagagacaacaagtttatgtttatgaactacctaaatgtctatcaagaggataatggttttttttttttttaaatgatggcatttccatttgtgatggttaattttatttgtcaacctgactgggctaagggatgcctagatagctggtaaaacattatttctggcatgttcttgagggtgtttctggaaaagattaagatttgaatccatagactgagtaatgaggaccgccttctccaatttgggctggcatcatctaatctgttgagggcctgcttagaacaaaataacaaatttacgctgtctgtttgagctgagacatccatctcctgccctaagacaccagcgctcctgattcttgggcctgggtcttacaccattagttcccctggttcttgggcctttcgtctgagattgaatgacagcactggcttccctgactctccagctttcggacagcaggttgctgggacttcctggcctccataattacatgaccaattcccatacccccattccataaaataatgagatagagctataaaaatatttctaagttgtatagttgtatgaaaacatcaagaaaaatagcaatgggatagtaaagtgtctgcattattaaaacgcatgtgtatacagtcagctctccacctccacagggttagtatctgtggattcaaccaaatggggataaaaaatattcaaaaaataaaaaaagatactaacaataatatgacaatacaaaaataatataaataaaaaccaatatgatataataattatttagctagcatttatgtcatatttggtattataagtaatctacagatgatttaaaatataccaaaagatatgtgtaggttatatgcaaatactataccattttgtaccagggacttgaccatctggggattttggtatctgagggtgtcctggaaccaattccctgtggataccaagggattgccatatacacaagtattctattttcattttttaaaaaatcagagcaccccaaaatttaatggcttcttctgagaagggtaattgcagatggcatgcaaaagggaagtttgaagttatacattattttgctgtttctttcccaataacgtattagtggattttcattgttttaagaaggggaaaatattcactcttctaaaacttataaagacacttttgtaacaactttaacaaattccatactccatagatgagtcatgtctttttagaagggtcattatcaaagtttggttcaaaatatcgtttgcttttgccagttataaatgtttgagagaatgtgaactttcgtctctatattcaatctagaattttcttagtatgatccctctgtggccactgagcacaaaatggtggtgttgctaggcagtgagagcctcctgcttcagggaagtgggttctaataactcttcaactaactggtagtcagaactgaagtggatgatgaaacactttcaggaacttggcaccactctcaaattcagaaattgctcttttaatatatgttggaggttgcgtgaaacaaaactgaagtttttccagtgtatttcagttttccagtcttccaaggatttgtggagttctcggtggcagaattactaacaatggattcacaaatgtgactaaaaatagatggcatgattgaaggcttaatttcatctaatctgatgcaatcttatgtaaagttatgtccacatcaagaagacagccatttcaggtagatcatgggtcaggagatcgagaccatcctggccaacatggtgaaaccccgtctcggcaaaaaaaaaaaaaaaaaaaaaaaaaaaaatacaaaaaattatccaggcatggtggtgggtgcctgtagtcccagctactcaggaggctgaggcaggagaattgcgtgaacctgtgaggaggggcttgcagtgagctgagattgcgccactgcactccagcctgggtgacagagcgagactgtctcaaaaaaaaaaaaaaaaaaaaaaaagacagccatctgatagtagagtttcacaatttctgacaaatctctaatgtccagttgcaaatctggactttatatctgactttttctaaacgtaaatttgataaaaatagctaaaatcctactatatgtaatttttaaacagccaaaaataatgcatagaatgcaagttgtcatatttttcaggagtagccacagtttctatataattatttgctgactttgattccactgtgacacaatcatttttaaaaatatatgaaatcagacattctagagtctgtcatgaaatgctaccaaagttttcttttgcttaagggcactggtgacagggcatcgtaacacaatgacacatggatttctttgagtttggaagtgtgccaccatcaaagatagggccacccatggattcactacatcagatcagaggaaattgaattataaaggacgatgttctcaaatttcaccttccaatgacatgtgacagctcaaaacagtcatagtgttcagtaaagttcttttttcatttttcttttttttttttgtcatagattttatagattggaacatcaaacaacatgggttagtttcaagaagacataagctacactggtgttccccaaagtgtctggtagcaggaaatagtctagattgctggttctcagcccaccatcattttgaccacccagggaaaatgtgacaatgcctggagatgtttttgactgtcacaactgagaggtgggattgctgctggtatttagtgggtagaggccagggtgctgttaaacaccctccaatgcacaggacagtagccccacctccctgacaaagagagttctttccccaaatgtcagtgatgctaagcttgggaaaccttaatccagagtaaactaaggcagcttctgaatcctttgacccttactttaccacaaaaacctgagatgccaacagtgatacctactcacacagctaactacattaaataaaatgatttatagtcggttaatcagcttgaggtactgcaacaaaatactgtaaaatactgtagattggatggattaagcaatagaaatttattttctcacaatcttggaggctggaagtccaggatcagggtgttagcatggtgaatttctagtgaggactcttcccggattgcttctttctgcgtgtctctctctcctctctctctctctttttttttttttgtttgagatggagtctcagtctgtcacccagactggagtgcagtggtgcgatctcagctcactgcaacctctgcctcccaggttcaagcaattctcctgcctcagcctcccgagtagctgggactacaggcacgagccaccacgcccagttaattttttgtatttttagtacagatggggtttcgccatgttggccaggctggtcttaaactcctgacctcaggtgatcctcccgcctcagcctcccaaagtgctgggataacaggtgtgagccaccgtgcccagccctggtgtttcttcttgtatgagcactgacatcaacagggccccaccctcatggcctcatttaaccctaagtatcttccaaaggtcccgtctccaaatactgtcatgttgggggttcaaggctgcaacatgggaattggtgggggagacacaaacatttgatcaattacatatgggaaatttacatgagtcctgattattgttattgtaggtctcataattgttaatatttgataaccacacaggagcctaatgagaagaactcttcacagtaaataaaaaagtattccaagctctgttgtaggtgacagacttctacaatctacaactcatcaagttgtgtatgtccacatgtgtatatgttggccaatagcagaaagcaatgttttgctgtctaattttttttttttttttttttttttgagacagggtctctctctgtcacccagtctggagtgcagtgtgcagtggtgggatcatagcttactgcaggctcgacctcctgggctcaggtgatcctcagcatcctgggtagctgaaactacaggcatacaccaccacacctggttagtttttgtttttgtttttgtctgagataggtcttgctgtgttgcccaggttggtctcacactcctgggctcaagccatctgcctgcctcggcctctcaaagtcctgggattacgggtgtgagccattgcaaccagctattttggtctcttaattgtgaaacaaataagagagcttctctctgttattgaagtgaagtagttacaactctgtcctgacacagtaatttaagaactttgtggctggagagattttctgaaatttatatcaacttgaaactgacattttccttttcctcgtctaggtgctaacctatggccttgcatgggtcttctgagatagaaacgtttttggtaattgttgactctttgtaaaattagtaatccagtaaataggtcttgggtatccatgttagtaaagtctctattttccatgaggagtggggaatacaacattgaattgcagtacctgctcacaggcaggtttacatataaatatgtttcatgacaaaatattttaagttctatggcaggtaccaagaataatctatgagggtttggaagagggtgactttcccagtggtaggagagaataatatatttgcgaaccatggtaaggagcataaaagaatcccaatccaagagcatcctgatttgggagtaaggagccctaagaacacgtggtcacctgaattttagagtctttatggactggtaactattatatacttttgattcctccacttgttagatggaaatgtctattgcagttaccttgttcttgcctgtcagaagtgtggctattttccaagaattaagcagtatttatagctcttggaggaggaatggcatcatgtaggctgcattttttagaggttcctccgatttctctggggaaaatgcatcgtaggcaggtaagaatgaaaatattgaaaattagaaggatatttccataatccaggtgagaagtgatgatggtttaaagttagaagacagcagtagagatggagagaagcaaatggatttcaaatatatatttacagatggtgagggtgggttgtttgaggtggatggtaaaaagaaaggaaccaagaatgacccttaactgcaaggcttgagatggtatgtgaatggaaatttcatttaataagacggtagagtctgagaaggaaaccactttgtacacatgatgtgagatgaaggtaaaggctggaaacaaactgtggatcacacatactaagtgtgtctactaagataatggctggatatgaaataagcaattggctatctaattgcatcttgagttcagtggagtgacttggcaggaggtaaatatttaagagtcaggtaggttatttttaggcatatggactggatgagacctttctagctagaaaattgaagagggtagaccaattcttggagcactgccatgttggaaggtcaagtagaggaagaaaatagaagtaaaggaaggagaatgtcttgggaaggatggagcaggctcatcccagtgtgtcatctgttgctattgaaggacagagaaggtccagcagttttagcaccaaggaaatcatcaataaatgagacaacacaatttctgtggagtcttaggaagggtgggagcccagattggcatcatttgaagaggaaaacatgacatgaggaaaattttagaaattaatactcttctggccgggcgcagtggctcacacctgtaatcccagcactttaggaagccgaggtgggcggatcataaggtcaggagattgagaccatcctggccaacatggtgaaaccctttctgtactaaaatacaaaaaattagctgggcatggtggtgcgcatgcctgtattcccagctactctggaaactgaggcaggggaatcgcttgaccctgggaggcagaggttgcagtgagccaagatcgcgccactgcactccatcctgggcaatagagcgagactccatctcaaaaaaaaaaaaaaaaattaatattcttcttcggctatgcatcagttccctagactttcttatgtcagttttaatcatttacataagatttaagataatcattcttatgtcaattggcagttatggatttgagatgctgttagtcaaacaattaaataagaacaaacaatcaacttttaaaattttgttcagctgattgcatgtatacaacaaacacactggtaaatatcttccatttgttcatttatcctttagtttttttcaacaactcaatacagaatatatactaaagacacataatttctttaccctcatggaactcacattctactgagaaagacaaaaaattaagtaaataaacaaataatgctgtacatggtacaaaatgttcagagaaaacaaacgtgattcagacacagagaacaatgagaaaactgatattaaatgggccggtggcaggagggctttctgagtaggggattttttaagctgaggcttgaatgatgcaaagatccaccatgtggggtactgggatgcagcagtgcagaaagtctggcaagatgccccgagagggaaagaactgggcatgtttgaacaaatgagtatctactggtatgtagcgtacaagggggtgtataattggtttggcgaggttgacagggcccagattatgcagggacttctagactcattttgaaaatccttccaaaattgtctcgacggctatttttaaaattttctatttctttgagtaacataggaatcagaagtatttcttggtgcagcatttctagagagcactttgacaatttgtataaaaaaagcttaagtacatgtactgtagagcaatgacttcatttctaggaatttatgctagggaaataattttccacatgcacaaatgtgtatacatagaatatttgcttatatttccaaactcctcaaattctatgcttcaaatattaataggtggtttgtacatgtctcaatagagctgattttgctttaagaaaaagatgcctaattaggaaaaatagctcatgcatgctgggcttaatacctaggtgatgggttgatgggtgcagcaaaccaccatgacacatgtttacctatgtaacaaacctgcacatcctgcacatgtaccctggaacttaaaatattaaaataaattaaaaataaatattagaaaaggatgcctaatatagaaaaattttaaaaatagcctaatgcatatccatatgagattagttaatatattccaaaccacccatatactttatacaaccataacaattactattttatttttattgacaggaaaatattcatgatatttagtattaagtaaagataagtcaaaaaaccagtaaatgtaatttcatttttatttaaattatatttaaattagaaagataaacataggcctatagatggacatgtaaaaatagaacattattcctgagtggtgggattatggatagtatttattcatttctttctattttcctttgttatctgaatatttttatgagcataaattacttagttattacaaatatgctaaattaaattcatgtttaaacaaaataaacattggcagcaacagaaaggctgatgcatgaatcaaagactggaacttaaggacattgttggagagcaagaatacagcccccacctcatttcagaagaaatgaatgttcaaattaacatcagctgtgatgaccaactgttttggaaagcaggccagatggtgttcatctttgctctctggtgtgttttaagaggatattattggacttctcagagactactcagtagcaacaattacaaaacatccctgtagctaggtcattccaattatcttctagcaaacatgcaagatactttgaagatttttcactagcccacaatttgtctttgcaatttgtccagaagagttcatatttacatccattaattttacttgagtggcatgctttcaattttgcaaagacatcctttcacatttgagtagctgatcatgcaggggacagagcatagttaacctgccatttgaacaggttagcctggtgatcacatatgtccacaggcaatttagctacatggccgatgacacaattaagacggattagtaaagaaaactgggttgcaaggcaagtagcatttctaaagtttcctaagagaccggtgcaaagaggaaaatcacatgttcatgatgttaactggccaaatttgattaatcatttttagcattaaagcaaaaaagaaaagtccatggtaaatacctcagcccaacatctattacctccccccaccgtttttttgtaagtttaaaaacaaacccaatccaatgaaaattaggagtcctttgcccaatgcttcatcttccatacacaaatcattcttattatggatttttcgtgctacagattttctaaacattggagtcttagagatgctaagtgactaaaattagacatggtttttgactgataatttaacaagtatgctttaagaatgtattaaagtggtcttcaaattatttgagtttaatgcctgctttccgaatcctggaatttggggtagcatatacaaaaggattaaaagtaaaattccagtgcgtctgtataggaagtttcaggaaatgtttaaaagagtgcagatattacgatacagtggatttacatcttagagtcctgaagtgtgtgcctaaggtaaaaatcatgtgtcccacggtccaggtgctctcttttctagcatcccactaatctacttgaggagcagggcccagggctgtctctcaggggctccctgaagtcacctttcttcttgattcccttctgattgtctctcttccactgcttaaagaagtgttttgtactgatgggaggggaagctgcgcttttattcgtcatctgcttccccaagttgtggttcatactcagagcgagaagagagtcttttctcttccctcaagaactaggtttttgaaattcaaaagccaggaaaagaagcccattttctctgccttctgctatgacagctcctcagtggagtacacacagcatcctaacaaagactcaggagagccagggaggtgcgggagcaaagtagtgcagttttatttacacttacgtttatataaaacaggaaggtaactggcctttgccgataattattacacaagtcaacatggtgttttcccccagttctgagcctaggagatcattcatctggcaccctgtgcaaggtgaagtaaagaagagatgaaattgcttggtgcagagtggtccctagccacatctgggctctttgattcactgctgcccaacgcaacgcattgcagattacatttgcactgtgaagtggatgtgtggacaatgcaacctcattttaattagacataccctcataaaattacagaagacttaataagattcctgaaaagaaaatgcagattgaaaatagcaatgataacgtaagcccaggcacacagcaaaccagcaccagcacagtgcagctcctagtcctactgtcaactattcctcacccatgtttcaaggttaaaagaaatcgggcagaacattcggcctgaaattcagatttgggggcatgtggggaagcttagaatgtccatgcaaggtaaaggcgatattttaacagtgaaaagcaacatgctcttcaaaagaaacatgttttgttgagaggagcctttaaaaatggatgtgtgggtgagtagatggagggaaccgatctatatccttaaaaataaaaaatagaaacagaatttcttttttttttaacttttgttttaagttcaggggtacatggcaggtttgttacatcggtaaacacgtcatgagggtttgttgtacagattatttaatcacctattaatcatcacttttttttttttttttttgagacggaatctggctctgtctcccaggctggagtgcagtggcgcgatctcggctcaccgcaagctccgcctcacgggttcacgccattctcctgcctcagcctccctagtagctgggactacaggtgcccgccaccacacccggctaattttttttgtatttttagtagagacggggtttcaccgtgttagccaggatggtctcgatctcctgaccttgtgatctgcccgcctcggcctcccaaagtgctgggattacaggtgtgagccaccgtgtctggcctcatcaccattaagcctactacccattatttatttttcctgatcctttccctacttccaccctccaaaaggccccagtgtttattgttcccctgtatgtgtccatgtgttctcatacactcttggtaggagtgcaaattcgttcagccattgtggaagacagtgtggtgattccccaaagacttaaagacagaaataccattcaacccagcaatcccattactggatatatacccaagggaaacagaatttctatctcacgaaaaaaatctttctgaagaagagttttagtaggtttatgtacccttttgtttaaaaaccaaaaggcatttgtcatttaatttacaaaacaatgaactgacattgaggaagatgcaaatttaccagttttgaacgatgctgcacaattggcagttgggtctgaaaataaatatcaacatttaggatacatgtccactgatgtccctcttctatttgggtccatgttatctttttaagatgtctttgtaactcttgactgccataaaaagccaacgtttaacttagacctttaaaatcacggttcagcttgcattttaaaaaacattaaggcatattcaatcatgttgttccccataaaatactaacaatatgttagttggaaaagaatgttttatcatgaatatataaaataaaattataactaagatatttgttacttcactctttatcaaatcattttaaaagtcctattttaaatttagtcaaacatgtgcatagtacaatataacagtgttatatatataaaataaatgattatacatgtattgaaacgtgcacaaaatgttttaactgagaggagtgcatttttttttggggcggggtgctgtggttatgggcctggtgaccagtgacagtaattaaatttgtaaattaagtttgtaaatcaaattgcatagtaacatcccccctcgtggtattcattatcttttagaaattatctcatcttcctaatttgcttgtaaataactcatcatcagggattattatttttttatcgtagtaggtaatcaagaaatcatttattcatcatataacaagaaatgatagatgcataggccttaatgcagtgacctctttttaggataactctatgagacagtataaaatattaatgaaaatttaatgaagttctaagcaaaaagtaggtaatagcaataatagaatccacttgcttaccaataaattaagtttttattttcacttttgaattttttatttaaaaacgaagttctgaaatgcttccatgtgtttcttccaatcaaagtaaatgatcttttaaaaacttacactatttttacaaatttctttcaagttatctctaaccaaataacattcaaagggttttatttttaatgagtggaaccgtgaattggaaaacaaatatgcaagaacctattaactggccagtaaattagaataaaaagagagaaattttctactactaaaagaaagctttaatttacatgcaaatgtgtagaaggaaaaaacgtgctggaatttacttttaatggatagcagagctagaaaagagacaagaggtacaaactgatggtgtctcaaatctactgccagatagacctgcaaagaaatgggccaatgtccttaggatgaactattttaatgacagtcttgccacatgagaaaaattattgattcatccaattaacattagtatgtaaattattcattagagcaactatcagaataaaattaggatttctaggctcataagttgtccatgcttctgccttctatagtgtgagagatgctgtattttggaagaatagcaactactttagtgaaagatgattacaaatggcataggaaaataaggcattaagtgttattataaatttgctcttagtaaataagcatgtttaattatttttgcattagtagggggctaggcctattgactatctacttgcaattttaagttttcttagtgtgatggtaataagctggtagttttgatagttattaattaaaatcttttttaaaaatttcatacatggaactctgtactccccctctttcccttgaaagctcaagatctggcattatggcaaccaaatgatgtcatatgaatgaaatcaaaatatttttcatctctgttcttccttagtttggcatcacccttcctctttatccattcaccacagatttgctgccagtttcataaggagtactttggcaggcagtatttatgaaaccctgcaagagctacgggatagctaaccaggaataacttccaccgcagaggtcttgctccaaagcaagttcagctctcatagtatggaaagtggtagcatcaaactgttttccaaactgattgtctcaagctagtaaaccaacttgctttgggggaaaagaaaaaacaaaaacaaaaacagttgtttgggcaaaggaagcttaacaattttatacggacacacacacacacacacacacacacacacacaccccttacatgtatacatatatatatagaagtatatataagtatacatatgtatatgtatatatgcatgcactatacatacaacatatacacacattgcatatatgtatatgtatgtatacatgtataagtatatatacatatatacacacatacactttacatgtatacataatgtatacaaaatttatatatataacgtatacttacatgtgcatgtactatacatgcaatatatatacatgtgtattgcatatatacatatatattgcatcgatgcacacacacacacacacacacacatatatatgcattttgtatgcattcagttttttgtccagcagccaacccatgttattctacttaaaactgtgagaatcaaggcatttcatctatgtgagaatcaaatccaaagacactgccatggcctataaggccagaaaagaggtttttctccttatctgtcaaatccagtgttccactccaggttttacttgccctacttcagccacagtggcctttttgcttttccttgaacttaactatgtgtgtttctgtcttgggatttgcactatctggttcctctgcctggaatgcttccctcctgatcttcccatgactggagggcttgttagagcagagtctgctgggctcccccaccagagttccagactcagcagatctggggtgaggcctgacaatcagcatttctaacaaattcctgagtgatgccaatgtggctgatatggagatcattctttgagaaccagtgctcttgcatgttatcctattttaattctctgcaggacacttatcactatgtgatattttttcttcttcatttaagaatttactatctgtcatttccactagaatatagattcaatgacagcaagaaaccagtttcttttgttcattactatattccctatgcctagaatgatgcctagcacacaacaggcactcaataagtatttcttgactcatttcatttgcaaaacatttgcatacgcattctattccaggtgctgggtgagaagccaggtggactaagattaataaggacgatccttctctgtggggttcataacctgttaaggaagaccatactctactccacatacacatactctctaatgcaatgtgataatcagtataacaaatccaccgtcacctcacggtgcaatatattctgattaaaggatggttttccagcatttggatggaaatgaatgagtttatggaagtatgtcctggactggtagtttcataaccttttaaaattgcatgtgcctttggacggaaacatggtgttgataactgggaaatgctaaggagtcacttgaatggcagtctctcaacagagctcattaggaatttgctgttttacagaaagtcaggctaatggcgggtaggaggggctgggataaattttaagaaaagataaacaggggcttctggggcactgactgtgtggttgcataggggttcactttataacaaatgaactatatgtaagtacatgtttgatgcacttttctcaatgtatattttataataaaagagtgtaaaatatcctgcctttgtgagttttaaattgtataattatgatattaaattaaacatatacttttgcaagcagaagaatttgctattttataatgactttatgaaaacataggtgaattttttttctcacttacatttatgaaccccaggagaaataggctcctgaacgctttcttgttagcaacagaactttccaaattattattatttttttaagaaggaatttggaattgtaatatgtgaccaaggaaaagggagatttttagacacaataacattaaaatatcttgttaattgtcatcaatttcaagggagaaatataactattgagtcaaatctatcttacactatttttaaaaaagttgtaaaccaaaaataaaattctaagtctccccagtcatctaaatgggcccctcctctcagccagggcactccaaagttaacctgaaaaactggctcaggccatgataggaaggaagggtcaggcaggccttacgataccctcctcccttttgaaattcagaaaaagcagaccagcatttaatattgacatagaccttaagtctgataagaaacattatggtctattctctctgaagcctgttacctggaggtttcatctgcatgataaaactttggtctccacaaccccttatcgtaacccagatattcctttttattgataattgctctttcaaccaattgccaatcggaagatttttaaatctactgaaaacctggaggccctccctgcttcaaattgccccacctttctggaccaatccaatgtatagcttacatgtatttgattgatgtctcatgtctccctaaaatgtataaaactaggctgagccctgaccaccttgaggacatgttctcagggtctcctgagggctgtatcacaagccatggtcactcatatttggctcagaataaatctcttcaaatattttgcagagttgaactcttttcatttacaaagttcaacttgtgattgaaacagctatctggctcaattgaatagcacagatttcctcatgttagagattaccaaccaaccttctttcagcctttgagcaagcattttacttgcttctcaggaaaggatgacagatcattttgtaaacaagccagaaggagtctgattctctagcccccagattaagactccatttattattaattttcataagaataaacaagttgtaatgttttgagtacatcacaggtaaataaaaccaaaccatattacaaaataaatcagtggaaagatgactttgtatttcacagcaattagctggatgattggtttttgttttgccttgagttttacactggaaaatcaaatttgaaaattatgttgagaataatgtgaagcatttgctacttttattaccaattgctttttgaaagctgtacttatacataaaattatttgagtttcaatgttacgaacaaaattcttgacatggaaagtttcatccaaaattctaagctgaggaagagattcattagttgatgattaccttatgatttgggtctgtcgtaatgagaaagcgtcatcaaaaaaatatttgttgagcaattgtttttcaagacctttggtgtttacaaagcgtaaaagatgcatatgcttatgaaagatggttcattggagatcaattgaggtactcatatattcaaagcctctgtgttttgaaaattctaattgccagcaccaaattaaagtcattgacgtttttaaaaatgttcctacgttttattattgcagtgttctgcacattaagttataaatatttatatacctaagtggaattatgtctcacggtggctccataaggcagctatatagaagagaagaatgttttcaggggaagagaaataacaacaacaaaaactccactagcatgaagttcttctgaataagtcctttaaattctggtttttgctttgtaacattttcttttcacaattccatgaaacccccagaagagtaaaatggacaaagtaattttaaggaagcagtgaaatcaaagtttccaaccaccacggttttgctcagtaataaattgtgtagagtgttatgaagatctaattcgaaaaccaacttttcagaaacatgaaaagaacagttacgctttctgtgtaatttctggggctagactttccactcctgcaatgattgtttcttctgaatgcaggatgttaatgacctgacttgactcattcctttaattaagtacctctgaaaattgccatatttccacttcagtttgggctttattgatctatttgggggaaatctaggtgatatatttctagacgtgagggaaggcatggaattcatccatcagaaggctgctggtccaattcatccaaagacgagttcattgagaggttttcaccccctctgagacttgtaataataataacaataacgatggctgctactgttgatactggatatgcagttattgatacaggacatgtagtccctggcacatatgttatttcattcaatctctgccatatcctatgagattggttaatcacatagtgctgctactccccttttaggcatgtgtaaattcatgctcagagtttttttgagcaaaaaatacttgttcaagtttccatatatgacaaatgctgatacttgcatttaaaccgcctttttaacttcgaacttgggctctacatactacataacctgtgccttgtattgcatgataaaacagggatttcaatgtattcaggagatcttggtttggtgattttgagtgatctttgaacaatttatgcaatatgtctccaacttttagaaaatttagggaccatttatagaaaagatgtagatccccttgtgttagtttaaattgcttttattatgttatttaataaacatgacagttatcttatttttatttctcatatacaactataaaagcacaagaaatttacaagttaatgtcaaataaaaccataaaaccaataaagctaaagttgaaaacattaacatgatataatacatgatgttattttgctgaattccaaattctgctcacaagtgaatggaataacagctagaagcaaagctttttctgagtttagcgtggctgtagtagctcatgccaggtcatgactctattttcccaccactttgttttttctatctgaactgctcatttccttagcgtactatgatattttatagcacctattagtgtgactggatcatttacacattatgcccacttctttccctaaaatattaaggtaacattacttgatctcaactcagtcagtaccatactatggtactgaaaatgagtaatagtgcttacatgcataataactgttacagacattactaccactacatcttcagttcttggccccattctgaaacatacaggaagatcacaggtttcccacctgcatgaagctagctgtatcgttggacacattttggcaaatgaaatgtgaatggaagaaacaagaaacagtgtgcagtacccaatgtgcataatgggaaaatgtctagatacttccatacaaaggaagcagcctctatcactgacccaacccttcaccctccagtgagcaataaaccttggctttgttaaccactgagatttgcaagttatttgttgtagcagaataacttaatctaatctgactaatgcagaaatcatccacacaatccaacatatccttatgttaatttggaagtggtattattatttaaaaacacgaaattaaaaggtcacgtgcgcacagttgcagcatcccaacacattcttgaggcttccaaatagtccacaatctgcaattcatgaaccattaatctatatatagtattgatccttctcttgtaaatgacattttctcatatcatgtggatgtagttgcctttttatttaaaattctctgagcagttatgctcagtcccagaaaattgctggctgatcctaaattgatggcgtcaatgaaaatccaatttcctggctccctgcatcagcctactgcatctagaaaatccttctgtctctagaacttcaggaaaacgtaaagaaatagataactaacaggcactgaaggccagttgtattccatgcttgagttaaatgtttgtggccagcccattagtttggcagatccagaatgtatttgaaaccctctcctcccaccctttagaggctggaaaagctaagaacgcatattcacagcttcttctaaagcgagcagtgaccctgtgatgcattctggaccataatatctaattcaaagttattggggtaggttccaaagcagcttttactcttttactaacaaaagagatagattaatctggctgttattcacttcatcttgctgtgaacaagcagctatatttcgactctgagggaaaagtcaagagactttcccaatgtggagccactaaaacaataccagcaattatctacttctagattttttgttacctgagaacaataaaattctatttaggttttctgttcctcatagctaagtacaatcccaacggacgttttcaagaatttcttcaccaaaacctcacatgatgcacagatggcagtagtaagattaaagtcattttagagggcaggaaatgcaaaccagataggtaagttgattttcctgcatactgcacttgtcacattctgtagtttatagtttaaactccatgaagatagggtcttgttcgttatagtctccagtttatcatcatatttggtgatatagctagaatgtggtcagaaaacatttgttgaatgaattaataaagattatactgtagccatcagcgttaaggaagaatcgcagttcagtacgattctacactcttaactccaccttgccaatatggatacctggccccctatttgaggccacttctaaatcccttttgcagaaagggaagttgttgcatagacatagaccatgggattaccactttgggggaaaaaactaccttaagaaaatcagctctacaaatgctctctcaaaattgcaaaagccgttaccaaacactaagatgttctaattagcaaattcctcctcgcatcatgcaaacacccaaaggtaaaagaagagccagaaatgtttggaaaattttcctaggggaagtggttggagaggaagaggaatctcagtcctctaattaaaagaacgaacttgagctaaaaagccatgtgggactgttgtcgtggtaacatgatccaagcaagaaagtttcctagagttgctattcagaaaaaaacctcttggtctaggaagcgttgcttgtgatgcaagatgccaggttttcaggcctagacttggaagattttgaagcatttataccatgtcattcacactaattccaagacacggggcagattgcttataatgttatgcaaatagccagtagaggggagaaaaaccccacaagatcattttcaagcaccatttgttaacgttattaatatccttaaaaagaaaataattggaaatatacattctaataggcttatcttctctaatttcttttgagtagttaagataacattagatttaagaaaatatgtcaaaaataatttcattagaattcattcaagattttcggtaatatatatcgaatatcaatataaactatcagttagctattgctgtctaatgactccccacttccaaactcaaatagataagcatatattactatgaatctatgggcagctgcatggttctactgatctctgtgggattggatggatctcggttaagcttacttcttcttcaaccgcagatcaagtggatggttctgcttgatcaggtgggctctttcggatgattaggggtttgttggttgcaggttggtccaaaacggccttggccagaacaactgggctctcttccatgtgatttgttatccatgacaaccgtcccacatggctctttcgctcaacagtctattccaggcttgcatacataatcgaggcagggctcctagaaagagcaggagtgaatagggcctcttgagttcttgtctcagaactcacataccataacttctgctgcattctattggccgaaataagtcataagtttatattccattgcttatatatgccacattttcattattcatttatccattgttggacacttagatttattctatattttgtctgttatgaatagtgctgcaataaacatggaggtgtaggtatctctttgataggctgatatacttttcttacctataagacctagtagtgggattgttggattgcatattagttttatttttagttctttgagaaatttctgtactgttttccataatggccgtagtaatttacattcccaccaatagtgtataagaattcccctttctccacatcctcatcagcatttgttattttttgtcttttaaataatatccattgtacctggggtgagatgatatttcattgtggttttgatttgcattcccctgatgactagtggtgttgagctttttcttcttttcatgtatttattggccattttatgtcttcttttgagaaatgtctattcagaattctagcccacttttttttttttttctttttgagacagagtttcactcttgttgcccaggctggaggctggagtacaatggcactatctcggctcactgcaacctccacctcctgggttcaagcgattctcctgcctcagtctccctagtagctgggattacaggcatgcaccaccatgcccagctaattttgtatttttagtagagatggggtttctccttgttggtcaggctggtcttgaactcccagcctcaggtgatccacctgcctttgcctccgaaagtgctgggattacaggcgtgagccaccgtgcctggccctagcccactttttaatggggttattcattatcttgctgttgagttgtttgagccccttgtgtattctggatattagtttcttatcaaataaatattttgtaggtatgtcctcccattctatgggttgtatcttcaatgtgttgattgtttccttcattgtgcagaagatttttagtttaacatagttccatttgtctatttttgttttcgttgtctgtgcttttgatgttttagccataaaatatttgccaagaccaatgtcttaaagtgttttccctatgttttcttctagtagttttatagttctgggtcttacatttaagtctttaatccatttttagttaatttttctatgtggtaagagataggggttgtttcattcttctgcacatggctatccagttttcccagcaccacttatttaagagaatgtcacttctcaaatgtatgttcttgttgcctttgtcaaaaatcagttggctataaatatgtggatttatttctggtttctctattctgtttcattggtctgtgtgtctgttttcatacctataccatgcagttttcctttctatagcactgtagtatattttgaagtcagatagtgtgatgcatacagctttgttctttttgctcaggattgctttggctattttggccaactgatttcacagggatattatctatacttttctttttgttgttgttgtgtcctagactgatttgattttcagggcaatattgacctaaaagaatgagttaggaacaatcccctcatcttaaattctttgaaataattctagagaaataagtgttagttcttctctattgagtttggtagaattcagcagtaaaccatttggtccaggccctttctttgttgggagactttattactgactcaatcttgttacttgttattggtttgttctagttttctatttcttcctagttcagttttagtaggctgtatgtgtccaggaatttatccagttttatgttttccaatttgttagcatatattcataatagtctctaatgattctttatatttctttggtatcagttgtaatgtattctttttcatttatgattttatttatttgggtcttctctgttttttcttggttatcctagctagtagtttatcattgttctttatctttgcaaaaaaaaaaaaaaaacaacatttttttttccattggtcctttgtatttcttttgtttagtctctattttgtttagctttgctctgatctttattatttatttccttctattaactttgggtttggttttttcttgcttttctagttctttcagatgtatcactaggctgtttatttgaaatatttctacttttttaatgtccatatttgttgctacaaacatctctcttagcactgtttttactgtatcccaaaggttttggtatattgtgtttctattttcatttgtttcaaaaaattttttaattttcttcttaatttcttcattgacccaatggtcattctggaaggtgctgcttaattttcatatatttgtactgtttccaaagttcccctttattgatctctagctttattccattgtggtctgagaagacacttgatatgatttcgagttttaaaaatttgttgtacaagttttgttgcctaacatatgatttatcctgaagaatgttctatgtgctgatgagaagagtgtgtattctgcagctgatagataaaatgctctttaaatgtctgttagtttcatttgacccatcagacagattatgtctgatgtttcattttaaatttggtcttctctctctttagctctgataacatttgctttaaagttctgggtactccagttaagtgcatatttatttacagtggttatatcctgttgctgaattgatatgtttatcactacataatgatcttctttgtctctttttactttttatttttttacttggaaattatgccctctgatataagtgtagctgctcctgcatgctttgaattttcatttaaatgaaatatacttttttcatctttttactttctgtgtatgtgtctataggtgaagtgagttcttgcaggcagcatatagttgggtcttggttttttgttgttgttgttttctatgaagccagtttataacttttagttgaggaatttaaactgtttacattcaagttcgttattgatgaggacttactcctgacattttgttaattgttttctgattgtttttatatcctttgttcctttcttcctcttttattatttatgtttatgatttggagatttttgtagtgaaacatttaattcctttctctttcttatttttgtatctgctctacaagtaaattttatattttcatgatggtagatattgtctttttctcccatgtggaggacttacttagcatttcttgtagggctagtctagcagtttttgcttgtctgggaatgactttatatctttttcatttttgaaggatggctttgttgggaatggtattttttagctgacaggttttttgtttgtttgtttgtttagcattttggacatatcatcccattctctcctggtctgtaagagttctgtcaagaaatcctgttagtctgatgggaatcccctgattcatggcttgatactttttccgtttttggaagtctctctttgtctttgacttttgacagtttaagtataatgtgccctgaagaagaccttttggggttgactctttttggaaattttttagctttctgtgtctggatggctatattgcttgcaatatttgagaagttttaaaatactatttcattatataggttttctatgtctttgctcatcttttatcttcctggaacaccaataattagaatatttggtcactttgttgtgccctatatgtcacataggtttcattctttttttttcttttccactctatttcttttttattcttttttgcttgactaggttgtttcaaaatacctgtcttcaagttcagaaattttttcttctgctttatttactctattgttgaagctcttgacggtacttctatttcattaattgaatttctcaggtgcaggatttctatttggtccttttttatggtatataattctttgttgaatttcttattcagattgtaaattgttttcttgatttctttgtattattcatctatgttcttttatatctttctgagttcccttaatatcattattttgaatacttcttcgggtatttcatacatttcctttttaaatgatctattatcagagaattattgtgatttcttgaaggtgtcattttttttttctttttcatgttccttgtgtctttacgttgatatctgacatctggtataacagttacttcttccagttctatgagttggctttcgtagggatgaacatttttctatagatggacctacagtgttgaataggtggggtgctttgtctttaatgctgggtaggcacagtagtatagtctcatcatgatttctttggctgtaattaacatcagtggtgtctgtgagttccccagtgacagactgcaattgttagtggagtctgtggtgaggctttgctgtctgtgtgaggacaccaggcaagctggtcctcaggcaccagtggtgccagtggtagacagatgggcctatcctcaggcccccaggtggtatgtggatggtgcttgtgatgggtgaggtaaattgatttctaggtccccacacaatgtacacaggctcctgcagcaggtaagattaacctgtcctcgggtccctaaatggtacatgtggatactggtggtggcaggcaggttgagccaatcccttggccccaggtgacatgtaaaaatgttttaaaaatttagtccagtcttatacactgtgcctttatttggagtactcaggcaatttatatttaatgtgatcattgacataatggggtcaaaatctaacatgttggtgtttactatttgtctcatcttttttatttttatttttatttatttatttttattttattattattattatactttaagttttagggtacatgtgcacaatgtgcaggttagttacatatgtatacatgtgccatgctggtgtgctgcacccattaactcgtcatttagcattaggtatatctcctaatgctatccctcccccctccccccaccccacaacagtccccggagtgtgatgttccccttcctgtgtccatgtgttcccattgttcaattcccatctacgagtgagaacatgcagtgtttagttttttgtccttgcgataatttactgagaatgatgatttccaatttcatccatgtccctacaaaggacatgaactcatcattttttatggctgcatagtattccatggtgtatatgtgccacattttcttaatccagtctatcattgttggacatttgggttggttccaagtctttgctattgtgaatagtgctgcaataaacatacgtgtgcatgtgtctttatagcagcatgatttatagtcctttgggtatatacccagtaatgggatggcgggtcaaatggtatttctagttctagatccctgaggaatggccacactgacttccacaatggttgaactagtttacagttcaaccaacagtgtaaaagtgttcctatttctccccatcctctccagcaccagttgtttcctgactttttaatgattgccattctaactggtgtgagatggtatctaattgtggttttgatttgcatttctctgatggccagtgatgatgagcattttttcatgtgtcttttggctgcataaatgtcttcttttgagaagtgtctgttcatatcctttgcccactttttgatggggttgtttgtttttttcttgtaaatttgtttgagttcattgtagattctggatattagccctttgtcagatgagtaggttgcgaaaattttctcccattttgcaggttgcctgttcactctgatggtagtttcttttgctgtgcagaagctctttagtttaattagatcccatttgtcaattttggcttttgttgccattgcttttggtgttttagacatgaagtccttgcccatgcctatgtcctgaatggtaatgcctaggttttcttctagggtttttatggttttaggtctaacatttaatttaagtctttaatccatcctgaaaaaatttttgtataaggtgtaaggaagggatccagtttcagctttccacatatggctagccagttttcccagcaccatttattaaatagggaatcctttccccattgcttgtttttctcaggtttgtcaaagatcagatagttgtagatatgtggtgttatttctgaggactctgttctgttccattgctctatatctctgttttggtaccagtaccatgctgttttggttactgtagccttgtagtatagtttgaagtcaggtagcgtgatgcctccagctttgttcttttggcttaggattgacttggcgatgcgggctcttttttggttccatatgaactttaaagtagttttttctgattctgtgaagaaagtcattggtagcttgatggggatggcattgaatctataaattaccttgggcagtatggccattttcatgatattgattcttcctacccatgagcatggaatgttcttccatttgtttgtatcctcttttatttgtctcatcttttctttgtcttttttttttttttttttttttcctcattctgtattttttagtgaatccaatttatctccactttgggcttactagctaattctctttgttttatgtttttagtgtttgcccttaaatttaaatttgcatctttaactttttacattccaacaccaaataacactataccacttctggcattatactattttcatataacagtatagttccatttttcctttctatgttttgtgttattgttgtcctatattttacttctatattttatgtatttttaaacattatatatctttatttgtaatattaggttggtgcaaaagtaattgtggttttggccattaaaaattataggcagaactgcaattacttttgcaccaacctaacataaatatatattcatattacatataaagataaatatgtaaatttttataaatgtaaatatattacatataaacataagtatatattcatgttacatatattacatataaatatgtaatatgtttacatatttttataaatattacatatattattatatatctttataaacattacaatactgttatttttgctttaaacagtttattatcttttatgtagactagaataagaaaaagttttgtatttgccaagtaaatatatagcattttcatcatttgtcattcttttctgcaaggtcaagttttcatctactaccattttcttctatcattacccttaaatatttcttttctattttttgggacagagtcttgctcagttgtccaggctggagtgcagtggcacgatcttgattcactgcaacctccatctccctggctcaagccattctcttgcctcagcctcctgagtagctgggattacaggtgcatgccaccacacctggctaatttttgtatttttagtagagacagggtttcaccacgttggccaggctggtcttgaactcttgacctcaggtgatcagcctgcctcagcctaccaaagtgctgagattacaggcttgagccaccgtgcccgaccttaaatatttcttatagtacaggctgtgggcaaagaattttcttagcttttatttatctgagaaagtctctcttttattctattttaagggattcttttttttgttgttgaatgtataattcctagttggcaagggtttttgttgtttgtttgtttcctgaagtactttaaagttatttcttgtcttctggcctggaaaatatctggtaaaatatctgtggtaattcttatcttttctgctatataaataatgtatcttttccccgtctgccttcttatgataatctctttatcattgttttaaaacatttgattatcatatgtctttgcttttccttgtgtttatctttattggtgttttctgaggttcttgagcttgtcaccgtataatttttttttttttttttgagatggagtctcactctgtctcccagggtggaatgcagtggtgcgagctcagctcactgcaacctctgcctcctgggttcaagtgattctcctgcttcagcttcccaaatagctgggattacaggtgcctgccaccatgcctggctaaatttttgtatttttagtagagatggggtttcaccatgttggccaggctgctctccaactcctgacctcaagtgatctgcccgcctcagcctcccaaagtgctgggattacaggtgtgggccactgtgcccggcccatattgactgatttttcttctgattatgagtcacatttttctgcttgttggcatgcctactaatatttgattagattcagacaattatgacattgtgacttttatcttgttaaacccttggattctgttgtcttcttttatggattgttaagctttgtaatggcaggcagttaagaaaatgacagatcagtttaatatattcaagtctttttttaaaagctccaacagcatggatgtagggcaagtttagctatatcactaaggtatgagtctcctggggtctctatttcaagtaatgagcaatgactgtccattctgactgataggcatttgaatgagccccaatcttagtcagcttttagcatcattcatcttataattccttgtcattttttgttcagctgtgcagagtttttctctacacttgcacagctcattattcagcaaagcctaattaaacccctatgaagatatctggagttctttttttccatagctcccctttttatggaactctaccaatatctttcagcagccttagcccctctgaactccaatctctatcttctcaaagcactgagatcatcatgctcttctttgcattctcccttcttgaatttcagtccggaaagtgcctataaggataagattcagacaatgacagagctcactttgtttgtatgtcttttcacaggaatcacagtccttcagtgcttgtttttttgtgtcaaaagcagttgttttatggatttggttcagttttgtagtgtagagagcaatttcagtgacatttactccactgtgaccagagttagatgctattttgagccataaattttacctaatacactttctacactaaaatctcctggaaatatatatatatataaaattttgtttatttatttatttttggtttttttttttcccgagacggagtcttgctctgtcactcaggtcgaagtgcagtggcgtgatctcggctcactgtaacctccgcctcccgggttcaaacaattctgcttcagcctcctgagtagctgggattacaggcacccgccaccacacccagctaatttttgtatttttagtggagacagggtttcaccatgttggccaggctggtctcaaagtcctgacctcatgatccacccgactggacctcccaaagtgctgggattacaggcatgagccaccatgcctggccttctcctggaatattttaaccatactactccttatcacttttttccaggtagctagccagattacagtttttttaaaaaaagcatgcttacctcaatattttattaagcatattaaatagctaaaacattattacaaaaagaaacataatcaaaatctaactctcagaaaagtcattatattctgttatctttttataagattactcttacaggtcgattggcagagatgactgagatgtaattcttttcagtaaatatcctggatcagaatcatataatcactcatgtctgcatcactgagaaacccttaaaatgcacaatatttttgaaagccaaagtccacaatggtagaaacaattatgtaactgaattttgttactattgttattattttttattatctttcaataagaaaactggtttaccttagaatttattttcttctgtattttcttgcatttagattagaaatattacaagttgggtatttcttctattgcatacatgtctgccaattcattctttgtcatggcacctgctgtggggattatgcatttgagacatttagtaatagtgaaatgatggttgttcttgggtcttaactcctctaaaagcaccacagaatttttttttaaagaaattagaagcacaggaagggtgacaaaacagtgtctactttttctaaacttcatctttgtattatctttaatataagtccttattaataaagttcttcttggaaacaagcaaatatttagataaactgatttttcttttttactcatagtggattgaaaaataatgttcatgactccaggctcaatttttatgagcatttttcaattcttgattcaatagaagggaatcagaaatcatataccacatcggggcatgaacaaaatgttacatcactaaattgccaagaaccagccccatgttcatcatgaaacattacatacccgccccccacacacacgtgcgcacatacacacacacatgcatgcaaacacacatattacctgtactctaaggcataaacctgagccctaaccttagtctggtaatatttcctcattctaaagaagatatcttggtatcttggtccctatggacaaacaaagcaagtgacacttgtggtagcaatttcagattaatggcctactcaagcgtgaagattgaaaaaaaatgatagccagttagaagtattaatcatttcttgacagcttgccctaatagcaccatttttatagttctgtggtaaattctgttttcagaccgaaatcattcagttatatatcatctatgtttgtaacagctctcccagtttttgtacaaaataaagaatcaagaaggtgctcgggagagaggaggtggctgggcaatgcattttcaatgaatcaggtgcttccatgttagctttgatttttagttaaatgcacacacaatgatattaaaaacatgaccaaagagcattgcctttgaagtcagacattcaaaaaaaagcacatgcaaagtaagagataagttctctttgtcaatgataactatgtctcagtgctacgaaataaaaatataaatgggattttttgccctgagctcttatctgatctattgatatgtttcttgatagcccatgtttattttgaacactcttataatgggtcaaaatcatgagggctcattgtccgttagtggaaattgtaaatacacatttggaatcacaaatgataattcctgcaagcagccttaattaaaaagatgtgtaaaaagatgtgtgccaagcctgttaaagatctcgttagcccttgacccccttaacctactctcaacaaaaatggcagagctcctctgctcaaacctaagtcagattgtgccactctttcacacaaagccttccaattcctttccatcctactcggggcaaaagccaaagccttcttgaaatctatgaggtcctatgatagggtctggcaaactaacagcccacggtccaaatctagcccattctttctttttgtacagctgctaaactaagaaatgttttcttagcctgtgcgtagtggctcacacctataatctcagcactttgggaggccaagagaggtaggaggatcacctgatctcaggagttcaagaccagcctgggcaaaacagtgagaccctgtctcaataaaaaaataaaaatatataataaataagtagataaaaaagaaatgtatacttaatatatatttttaaatggttgaaaaaactcaaaagaacaataatatttgtggcatgtgaaaatgacatgaaatttaaattcctataaataaagttttattgaaagacagccaggcccattcatttatgcattttctgtggctgcttgtgtgctacaatggtagaggtgggtcttggtagtaacgactgcatgattcagaaagccaaaatatttactatctgatccattatagaaataaatgtgccatctgcttccctctgtctgccatggcccctgttggctctcattcttccattcacccctgcagccaaatgcttccacctcaccctcctcattgctgttctttgaacctggtgctgttctctctgctcagaccctttgctttacttctcccttggcttaaattttgctttttgttttcgttattttttgcagatgtctgaatggttttctttttcattcacttcatgtctttatccagatctttccttctcactaagaccttctgagccattctatttaaaagtgccaacctcctccttcccacctctttccctttctgtggttaatttgtctccaaaacttctctttctctcacattctcaaatttttacttaattattttgcttattgtttgtcttcacaatctagaatgttaaattctatgaggtcaggaattttttgtcttcctttttttttcaccttttttttttactgctaacttcttaggactaaaccagtttctggcccacagtagatgctcaataaatatttgttgtatcagtgcctgaatatacattgaaaacacatgcctattttgtgatggtgtcatctatgtactatatatagagagagatctttgggtagggagttttttttttttttttttttttttttaatagaagacaaagtctttggtattaaatttgtcttcaccgtggtttttctagattcttccttttgagtgctttccattctgctaacaggatgagtacaaccttcaatttcctattggtaaaaccatttctgtctgaggccagatcaaacctggtgtagtcagagtttactgacaaaagcacctgaaatttctcttgattctgttcatggaattggccctgaatgaggctcctctttctcttgcctcataatcctgagttcagttccttaaatcgtgttcactcctgtagcaataattgtaaaaattcaccttgattgaatgctttccttgccaggtactctacacagtcacagatttatttactcctgagggaagcagttgagtacgagcaggtttttttttttttggaagagatctcaggttacactgcatgaaagtggagaagtgagacctgcaaggcaggaaagcatataaagtgtgcaataaagggcaagttaccactgtgggcaaccagggctcaatctgctgggaccctctgggtgactatcagagcacaacccgtgtttgtctcccaagagatgaggaaacaggggtattgtttgaaagttattcctgggaaatgactttccagtcttgatccttctgatcagcctaatgatcaggctaagaacgtgtactggccagagacctctatcaggcagagagaagaaaatcagctgtagctgtgtactgtggataatcaccttcagtttctgtgcagtagcccaggtgatatggtagggcattggcaacatctgctcaggcactttccatcattatcttccttaattttcccaatgactacatgagatcagtcattactgcctccattttacagacacccaaactgagattccgagaaatataaggtgggcaagagtgaaagagccacaattccattttgagactgtctgattcctaatcctgtgcttgtggccactgggcatcccaactcttccaaagccatgttgctaagtggtccccttcttaaccacaaaatcctgctaattatttttttggatccactgtcagcacagccatacaaatgtatactttctctctttcagcctttccatgatccaccaaacagctccagcatccacccctacaataagtaacatctgaggacctttcttcttccatttcctcctcaaaatgtcttttttttttcttctagtttctgcaaggcttttctcctcctttgctctaggtctttgttcagatattgtcttctcattaggacttcccaaacctttctatttaaaagccacaccctccttcctcaccctttttgcctagactttaggccagaggtggcttggaatgaagcatgggctttggaattagattcatctagcattgaatgttgcagccagagtgttcttttaaaaatgcaaatctgatcacaccagcctcttctccctcttctcctttgaagcacttacattactttctgttgctcttagaacaaagaccacatttcttaacacaacctcagggccctgcacgtgctgcccacctcactaatgtcaaactacaccccttgctgctaaccccctgactaacaaagtaagtaatatttctgtaattgttttgagtccttcaaatgctgtatgctcccttctaccacagggcctttgcacatactcttctttctgtctgaaatacccttgtcctttctgatgtttcaatgatcatctcaacatcacttcctgaaggaagtcttctctgatatcactatatcctccattcctgttctgggtcaggtttgatttttttacaaaatgtgctctttttcttcatgacgtttctttcacttcaatgccacacttttatttttatttttgtttatttattttttatttttcgagatggagtctcgctgtgttgctcaggctggagtgcagtggcgtgacattggctcactgcaacctccacctcccggggtcaacagattctcctgcctcagcctcccgagtagctgggactacagacgcattccaccaagccaagctagtttttgtatttttagtagagacggggtttaaccatgttgaccaggctggtctcaatctcttgacctcgtgatctgcccacgtcggcctcccaaagtgctgggattacaggcttgagccaccgcgcctggccaatgccatacttttattaatgtaattatgtgattgttatatctcttcttcttcaacgacaagctatgatcatcaccactatcatcattatcatttctacttctccttcctagcagatgcctggtctgacacccatttctcagtctctcagtagtaccaacagtgccctaaccatgagcacatctgaagatttttcaccaatgttgaagtcagctcaaggatgttcatacccagcccatgtaagatgtgtagaaaagtttctgttttgttttgcagtgagatatttcctcccttagcagagctgaactgacttgtttgatcatggcttcagcagcacccatcaataattaagtgaaatatctcacacacttgcacctttagattttctttttaatgccgagagcgggaaagtacttaaaacagtcaaataaacgtcacttgtccttcaaagctgaatttcaaaaggactttgcacgagcatctctacaagatctccaggaagaagaatatgcctggggaggtgtggtgattggatccacctccccatattgtgtataaaacatttaacttcttacagaacaaaataccggttgaaaaagaaatgcagttttccttgtggaacatgaaacagtgttacagggtgggtaattttttcatcaaggctttccctgactttattacaataacaggtgtattcatcaagataacctatgttaggcttcggtaacaaataccatacatccccccaaacacatcccaaatctcagtaaccgaacacaataaaagtatgtgttactcatgttaagatcaaatgtcagtcaggcagccctcttgcatctggatcttggggtctccaagcttcctgacgcagagaaagaaagacagggaggaagcacactggctctgagctacattggtctgaaagctgaccacatcgcttctacttttgccttaacctaagtccaaggatcatgtcttaggttttaacaggatcccataccctgctgtggaggacaaggacaggaggtgggagactagcaagaagctactgcaatcatttaggcagagatgttggtggtagaagccttgatctactacattgttccagagttttccttgattatccttgatccttgattgttccagatccccttgttttctcttatcacggacaccatgctggcttgtatctgagataataccgattgtccttctcctttggcctcactcccagcctcttcctctcactcaacaaccgacatgtcacttgggctgtgtatttattcttactaagtgcctagtttgaccatctcctgaagaggtttttactctgtacctgcagcgtagactgtaagtccatctcttatgttgaatttcagtgtcatagatactcttcgttatgaatgtgcactgtgcatgtaaacaatggaatgtgttacatttaacacgtaagccaattataatttgcagaatcgtgtatttacatatcacgtctgaagtcaagctgttaccatctttttttatggctcaaaataatctgatatgaaatcagccctcccatatgttcctggtaatcaaactttcttgaaatagtacggcaatttggcctcgatcattaagaactcctgctgggcctgctgggtgccgagactaagaaatgcttcttgttgatctgtacaagtcttgctcccaaagcagaaagcattgccttttagctccacaccccattgactgtccagcttttgtttgtgttgagagccaaatccatagttacaataagtgattaaatacaccctggagatgccagtcatgggtcaactctttcaagagggcgcatcggggaaggcagctacaaaataatacagagcagcatcagcctgagcaggagaccaggattctcattcttgctgtgctggtaaatgaccctgtgacttaccccttttgctcctttatttcctcatcttagtatatggagattaatttggaaaattcgaaagcctctttcagcactaaaattctgttattatatactctttacaaaacatattgggaggttagctaactcttctgaatgtatcctaaaatcaatagataaagtgactttcgatggaatgttatgtatccactaaaagaggtattttaagagaataattaattaattacatgaattatatgaaagaatttcaacatgtttttagaaacaaaaatatatgtggataggaaaaaagtgacaaaaaattagcagtcttattttattcctatatttttctgtatttttcaaactttgtaaaatctgtcaaaaatccttttattccttctgattgcctctcagatttgaatcttggtcaaatgttcaaaccttgatcttgcttaatggatcacaacccattcagaccccaggccctccctacctttttgtaataaatatttgtaaagtcctcttatttttcatgaaatgaaattcataaataatacaatgtaactatatacataagatagacataatcctgtaactgtaataaaggaaattagaaataatgtaaattataataacatactatatatcttgaaatatgaatacttagctgcattagaagtcctgtgaaatctcttgccgcccacatccatagatgggagcatggtggacttggcagcttccagcacaggctgatccaggcacgatggatggcaatttaaataccgctgtgatccacatggttgtcagtgacaggattgtgctaaagaggaaaagttgataaagttccaacgagatagagtccaggtttcttttgagttacacagtagtttcatatttgagaaagtcatcaaatattagaatcctcaaagacaccttatgttcctatgtcaatggacttaggttctaatctcaattaatcgtaaacaggtgtgtcatctgtgaatggcatttgaatgttaggccaaaggtgagacaattcttttttgggcaagactgttttatgcattgcaagacacttgcatctcagttgccccctcttgtctccactaaacgcttatagaaccctcattactatgataaggaagaaataccccatgtatttccaaactcttcttcaaggaagcaaagaagaatcttcttgaccaacacctgtcgtgaagctctgttccagttcaattctgcctttgtagcctcgacttttgcccttgaccatgaatcccctaaatccatttatttcctgagtacagtataccacctcagtctgtgtactgtggcatatgtgggtttgtctatctggggtgtcctacctccttagcttcctgccacaatgtcatcataattcattaagatgcctttgacatccaagacacgccattgttttatgtgcttctgggaaagaaaaaaaaatcctgtcaagaaacctacagtatgttactgaatgtaagatgcaccccaatttctgagatataaattgtgaaaaacaacacgcatttagaattagtaaaatctttcaagtcaggcagccttagagaagctgcgtgcttcagtgtataagaatccttactcagcaccagtgacctagttaaatactggctccacctcttggagcagtggtgcttcacttttcttagctcttaaaatgggaatagcaattcggtttttggagaattctacaacttgattcatgtacaacatcaagctcatgtctggcacatagttaatcccccaatgatgattattagttattatttttaatgatgggaaattgcaatgtcatctctattgtgaatctgtcttggattctctctatcggaagtacctcctcctttctgtgagcagccccagtagtcacatacaacctctcagttttttggtttccttacatggctttggggcttagagaccaagggaagcatcaaccgtttcagaaacttaatgtctgacaaagacggtggtgctcagtagggcttcaatcagcctttaaagacatcataaagctgggagaaaatctagacctcaggttttcaaagtccccaccctcctttttcttaacagcagaataaccttcagaagaaatattcagcagaaacctgttgagtggaaacattaaagaggaactgttttggttgaaggtcttgggaacctcaacactcactctaagggaccctgttgagtctcctaaaaacttagtgcttggccgggcacggtggctcacgcctgtaatcccagcactttgggaggctgaggtgggtggatcagctgaggtcgggagttcgagaccagcctgaccaacatggagaaaccctgcctctattaaaaatacaaaaattagctaggcgtggtggcacatgtctgtcatctcagctactcaggaggctgaggcaggagaatcgcttgaacccaggaagtggaggttgcggcgagccaagattgtgctattacactccagcctgggcaacaagaacaaaactccatctcaaaaaaacaaaaaacaaaaaaacccaaaaaaaccaaaaaacaaaaaaacaaacaaaaacaaaaccttagtacttagtagttttactaaggagactcaacagggtcctctagagatcttcaggaacatttcgggggtggaaatgtcatctgggtacatgcacatacatgcgtgcacgtgcacacacacacacacacacacacacacacacacacacacacacacacacgatcctgaaaggagaaataacttgcttaactctagaaatcgtggctctcatttactcagcactgattctcttccaggcattgtgcaaacacttcccaggcatgatctgttttaatcctttggaaatcctatgaggtaggcatagcagattcccaattcacaaaggacacaactgccaattagctcatacagctgatggggcagtgttgggctattatcctagggtctctgatcctgaagccccaaatctcaaccaacgttacatctttgtttcattaagtcagtgtcggaacccagtctgtaaccagctggctagtctttcaagtttgtgggtcttctccatcatatccctactaagaaggtttattcaatgatctttcacatcctgggatttatgtacatttgctcattttttagcagcttcttgtactccacaaagcactgtttggagaaaagggagatttgctgcctataatttcagctccacatagcaagcctggttgggaagagagagggagaggaaataagattctattaatgcatcatgcccacctccatactgggataaatttctgaaaaaaagtgaaatagcactctggtaaaccaagcgtcattacagtagacatgtggctcccccagataaacaacctagctctgatttctctccaaggagcagtataatagtgtagttttacatttgatggcttgaagtcaggaaaccaaatgctggatttttgttggatctttgcgaattcagtccctttattttgttctctccctagtgatgcgtagtcttagaaacagagaaaagatgatggaaattgtaaccaacagtttagtaaatatccaagtcattttccttcttattttctttgaaaagatggcattgcaaatttgccaattcatttgttttccaaggcagtgaaagcaggactatctgttaagaaatgcacggagctgccaaaacccgctgagcagcgcccaacatctggaattcaaactgctggaaatgtagggagtaagaaagctattcgcctgctgttcactgcagataaagtaatgctcattaaggcttagagtgatgtccagggagtcagttcacctgttagaacgcctatcatctcatagaagccttgcctcatgttcctgaaatctcataaaggagcaccagatgctgtcgaaaatggtgggaatgttttcctctgtatatactttctcaattaaaggcacttttatttaaacacacagccatttgatacacagcaaatgtttgcttacccagaactcaaccaaacacaatgtttcattagttcttccgttcatgtccatgatgagcctgttatcttataatatcttgaagtttcctttgaatcatcaatgaaagattaaattccgttgggtgtgttttcagtgttttgcacttgcatttgaattattttgtacattttgacaacataagtccaggatggcaaacgatatctcccagcatactttcagccctgccatttcccctgcttctgctcaggtgcacactgcggccattcttaattgatcagggaactccttcctccagatctcagtcctggcctttcacccgacaactactaaaggttgggtgatgctgatactaaaatatggaataacacttatttgccattacaaaacagataagtttttgtaaaaagaagattcagttaacagctagataaataggattctgttgaacttatgaaaagctattgagtgaaatgcatttttatatgctgttgatgtcttaggtattatcttcagagtgtatgaagctgactcacaactaagcagactgttggtgaacttaggcaatgttagtagcatatattaacaatccatgtattttaaagcattaatatgtgagtaaataaataactcataacttatatgcaattatacaaatgataattacttcatactttataatttgtatatataaattagcaagaaactatcccataattaacagcaacagccaacacatagaaaggatatattatagttatgcaaccccatgtgttatttttaatagaaaactatacagattataaaatacacacagctgaaatgtacaattcagtgtatatatttatataatcctcaaacctttcaacttatgaagatatagattatttccattagcccccaaaattgtgcctattcccactcaatcactgccctcccacttttatttgataagagtaaccattatttgacttctaccaccatcaatgaattttgcctattctaggactttctgtcagtggagtcacacaatttgtactctttagtgtctgtcttttttttcactcaccaaaagttttctgttttattttcagattaaaacatgtgattgcatgtaacagtagtttgttcctttttcactgctgattagtattccattatatgaattggtgtatctgtttttctactgatggacatttgggttgtttccagttaagctttattacaagtaagtcatctctgtaaacattgatgtgcaagactttttgcaaatacctgtttccacttctactgggtaaatatatagtagtggaattactgtctcatgtggtagaggcatatgtaagtttatgagaaatttgcagatcattttccaaaatggtttaactactttctctttctcaacaccaatataataggtccagatgcttcacatccttgccaatatgtgatgctgtccatctttttagttttagccaccatagcgtgtgtgcagtggtatcttactgtgcttctgttatgtgtttctctgatgactattgataatgagcaatttttcacacatttattggccatttgtatacttttctttcaagatatattgaagtatttcctcaatttttagttggagtgattgtccttttattgacttgtacgaatatagctggacactggatacaagcctactgttatacgtaagctttacaattattttctttcagtctgggcctaaactatttattttctttataatagtttttagtgagcagaagtctttcattttggtgaagcctaacataatttttatatccttagaaatttttgcatactccaggttgctttcagtgttctaactaagaaatcgttgcctaccacctggttccaaataatgttttaatggtttttttctagaaggttgatagctttagttttcacattatctgcttgttcctatcaccattacatttcttttcttggtatattgctttgacgtcttaatgaaaattatgtatggagtctatttctgagtttctattctgttttaataatctgtctattcttatgcaaataccatacttaatctaactttaatacagaagtgttgatcttttaattttattcttttcaaaactattttggttttctaatcagattgtcaggttttaccaaaaaaattctgctgagattttgactgggattgcattgaattcatagatacattttgaagatgttcatttaactagattgcttatttctatccatgaacatggtatgcttctcccttattcagatggcctttaatttctctcagcattgtttggtatgcaactctgtgtatctgccattaaatttatccattggaattttgtggtttttttttttttaaacttttatgttcagggtatatgttcaggtttgttacataggtaaattgtgtgttgtgggggattgctgtagtaggaattattttgttacccaggtaataagcatagtatctaatagttttacggacctcacccctctcccaacctccaacttcaagtattttttaatgttattgtaaatgttattgtcactctaaatttgattttccaattctgctttgctacaataaggagatataatttttgtagattggcatagtatcttgtgaccttgcctaatttacttgttctaattattgtttttaaactcattaagatttttttgcatatatgaaattgtcatttgcaaataaagatgtattactttcttcataaacttttaaataagtagggagaaaatttttctccccacttattgcactggtcaggatctttagtacaatgttgaatcgaagtgaaaagaatagacatccttgatttgttgcttatttatgagccaacattcagtttttcaccattaaaaatactgtttgccgtgagtttcttatagatgccttttgattgcaaaaacttccttctatttctagtttcctgagaattttttcatgaatgagttttgaattttgtcaaatatgtttctgaatctatgaatataattttctttattgtattaatgtggtaaattgcatcagattttgaaatcttgtattcctgaaataaactccatttggtcatgatgtattattcttttttacattgctgaatctgattttgccatgctttattaaaatgttctccatctattttcacatggagtgctggctgagttttcattttatataatgtccttatgtggttttgttttcaaggatatgatggtctgataaaatcagctggggcatattctttcttctctgttttctgaaagtgtttgtgttaaatcggtattatttcttttttaaatgttaagaattcaccagtgaagtcatttgatctaggagtttccttttggggaaagttttcattatcaactcagtttcttaacagatatagggctattcagatttttctgtttattttcacatccattttactaaattatatcattcaagtaatttcgataattcatgtaagttgttatattcattggtataaagttgattataatattttcttattagcctagagatgtctgtaggttttatcataatgtacccccttcattcttaattttggaactttcctcttttttattaaaactgttcttgtggtttgcttattcttgctattgcttcccattttccatttcatcgatttcaatgcttacatattagttccttctttctacttatttccattctaatttgctctttttataacttagttggaaaattcaattataatttaaaatttttgtcttttgtaatattaatatttacatctttaatttttttctcaaagaactatagtagatgtattccaaaaattttggtatgttttcattctgagttcagaatagcttctcatttttcttgtgattttttttccataactcataggttattttgaagtttgtcattcaatttataaatatttatttttttcagatacattttgttattgaccttcagtttaattctgttatgactagagaacatactctatatattttcagtctttggatatgtattaagactgttttatgtctcaatctatagaatatcttaatgttttatgtgcatttaaaagaatgtctattctgcagttgttcatttgagtgtcctataattactagctaggttatgtcccttgatagaattgttcaagacttgctgattttctgaatattccttttatctattactgagaaatgaatattcagacctacaactctgtgaatttatgtctatttcaattagtttttgctttgtataatttgaagctctgttattaagtgtgtatgtattatgattgctgcatcttcattatgaatggacacatatcacaaaatatttccttctttttctgtggtggtaatctttaacatgaagtctactttgtctaatattattatagtaactactttagcattcttaggattagtgcttgcactgtattttatttttaaaccttttcgtttatctggtgtctatatttaaaatgtgtctcttataaagaacatatagttgtctcgctttttgaaaatctaatctaacaatctttgccttttatgtggtgtgcttacttcattacattcatttaatgtaattattgatactgttagttttatatctaccaacctgcttcatcttctatttttatcaactttcttttgttcccttttcttccatttttacctgcttttggattgaacacatactttttaaattgtatttgattttatcttttctattggctttttgactgtacttttaaattttatttttaaaaggattactctaggaattataataattatactaaacttactacggtctactctgaattaatgttgtgccacatcaaatataataaaataaccttatagcagtatactcccatttatctgcttcacgttttttgcgctattgttaacatatattttatacaatgttccatgcatcttacctggtgcttatgattagaagtgatacctactacctactcatggacagtccctgaagtctctccatgttatcagagacaataaaaaatattttttatacaaaaaaattattgaacattatattttaggaactgtgttaagttctggagattcaaagatatgtatggtattgtccccgatctcaagctcactctctagagggagagaaaaaaacatgaacaaataactatgctccattgtattgtgtgtcatgaaaggcctagccacaacagggcacgatgagagaggactggcacttcttttagatactctggttatctaaaagatgcccagcgtgaacagcacttctagatggtacatgtggagagatggaatcaggatggtcatgataaaagaaagtattcattgagaaaaatagcttcaatgagcttataaaatgccttccatgctttccattgagactttacccagtgagcgctggggaagccactggatatatagaatcaggcaaatgacttgtcagaactttttaagaaagaataatctgggttgggtgtggtggctcatgcctgtaatcccagcactttgggaggccaaggtgggtggatcacttgagcttaggagttcgagaacagcctgggcaatgtagcgaaaccccatctctaccaaaaatacaaaaaatttgctgggcgtggtggcatgagcctgtgatcccagctactcaggggctgaggtgtgaagatggcttgggccccgggggggtggaggctgcagtgagccataatcgtgccactgcactccagccagggcaacagagtgagcacctgtctcagaaaaaaaaaaaaagataaaagaatagaaaaaagaaagaatagtaataaaaatactatttgtttcagaacttttgagaaacagtttgttgcaaacttaacaataacattgacactgtcaggataacatctcaaagaacatggtacccttgcttcagaagaatagcatcattttaatgcagtattccacagatgtctgtccttcccatagaattaatgttttgataattttattcagcaaagctatatttattgttttgttttacttatctaatagtgagctaaaacgtcagaaataaaatatcataaattcttatttccattttacaaatgcagaatttgagatgcagagaaataatgtcaccaaaataatctttcagatcagaatttatcaattttatttctatctagcatttaaaaaaacatgaattactatcaaattccgtaaacttaggcttcacataatgattatcattttttaggatattcacatttatgataagacaaggaaaaagaaacagtttataaatattagaaagtatcaaacaaaattataatttttttcagagtccttgtttttctttctaaaatgcaagtgagaaaaaaactgaactgataataagtaagttctttaaaatggccagtaaaataaatttccaaaaatcaatagcttttctatgtgctaaaaattgttagaaaatataatgcaatataaagtcctattcacagtaataacaaaaaaagtgaaaaaagttatacctaggaatacatttatgaaagatgctgggccaaatttttttaaaaaccaaaacttgtcagaggaatataaaacagaaataaaggagaatcatgatgattgaataaatgcaaattaaaatgagataataattatctgaaagagataacccacctgctcctatccattaaaacttgagctgcaatttgtttagtatatcagtggccattcacttagcaaagtcctcaagtactgagctataaccttagcaagtttgttaatagtcatgatggaggaaaagatcagaagtagcattagaagggacattacttatataatatgttaaccttttttgtaagtctctctaaaatggataacttccttaatgcatcaagactttttgtatgtcaagcaatttttccatggacacacaagaaaaaaaaattgaaaaactgcaactttgatctatgacaatgttttttatatattgttttatgctcacaaataagaaatatcactatcacactcagcagctgtgtttgttgttgttgttgcctctgtgttgctatagaatgagtcagcctcattaccatgtctgttcattaaggttttttcctaattgcactcttggactaagcttccataatcgagaaagtgagcatgttatctactcacacagcagccctgaatgaggaggcagccttgccatttattgtgtttttgaacagaagtgagtgatatttttaaacctaaagtgagaaaatggcaactgtagctatgactcaaacaataggcacctgcagctgttacaagttttgctagtctaagaaagacaaaagatggtttctttgtttttaatcattcttgacattttatttcacaaagtcctgactgtcctaaactgtctactgaagcttggatgcctaattgtactctacagtgcaaattagggatgcggccaacaacttcttttaaagagctgatagcaacaggaggcagccaaatgcctaggcagatggggcgggtatctgatgaagccccacctccaaacccaagacagtttaaagcccaaaagccaagctgcaaattaatctgagtctggattgagaacttgtctcctatttggcatgctttcctctgattgatccctacccttcatttattttacatatacctaccctttcctaattgattttctacactgtcatgcccacctttgagtggtgtcttccttttaaacttttttgcatattcacaaaccaatcagcatgcattcctcatcctgtgcctataaagaccctagactcagtcagtaggagaggagatgacctgacttcagggaagagacaacctgactttggggaagacaacctgcccttcctgtcccctctccagctcttctgtctgctgagaatcgttttcatcactcagtaaaattatccaccttcaccacccttcaactgtccatgtgacctcattcttcttcgatgtcagacaagagctcaggatccaccaagtgtgggtacccagaaaaggcggtcacactggcccttgcccttgctggtggagggcagctgccccacatgatgaggaaagggaccaactgagctgctgaggtcatttctgttttgttctggtaattgctatatgggaaatagggaagagctgctctcaactgaaatactctgatgattgcatccaaatacaagttaagcatccctaattcccaaatccaaaatgctccaaaattcaaaactttctgagcactgacatgaaatagtaacacctttgctttcagatggtccaatgaacacaaactttgtttcatgcacaacattatttaaaatattgtataaatttagcttcatgctatgtgtttaaggtgtatataaaaaataaatttcatgtttagacttgggttctattcctaagatatctgattatgtatatgcaagtatttaaaaatctgaaaaagttcgaaatccaaaacacttctaggcccaagcattttgaatgagggatactcaactcatcatctctttcagtcagtagacctgtgttacaactattgtgaaatagccatagtcccttcccttgaaagaggtacagcctggggtgagtttgtaacccagggtacccgggttttggggtacacactgtgaaaaagtaaccacctgtaactgttgcaccttgagttcttgtttcaaaaaatttccagaaagaagttcaactggccggacgcagtggctcacgcctgtaatcccagcactttgggaggctgaggcgggcggatcatgaggtcaggagatcaagaccatcctggctaatgcggtgaaaccccatctctactaaaaatacaaaaaattagccgggcgtggtggcgggcgcctgtagtcccagctactccagaggctgaggcaggagaatggagtgaatctgggaggcggagcttacagtgagccgagatcatgccactgcactccagcctgggtgacagagcgagactctgtctcaaaaacgaaaacaaaaacaaacaaacaacaacaacaaaaaaaaaaaaaacgcaaaagaagttcaaccctggtggggtggggatgggggagaatggttggatcccaagatgcctgagttggaaatgaactttggtgaactctcctcttaccatatgaaaatctgcacccagagagtagcttattcactattttctataaatgccattgatgtagaaacgtgccatttatacagaaaattcactattttctataaatgccatttatgtagaaacattcactattttctataaatgatatttatgtagaaacaaggaatatgcaacacataaatgccatttatgtagaaacatggtcgggcactgtgtctgggctgcctttactccacctctacatgcattgactcagctaaccagcctgataacagtcctgttttcactgttgttcagggagagacactgctttggaaacgatccccagcgttccccttacttgttgcaagtaataaaatccctgtgtcaaatcctccttggttgcgaccattggatggtcaccatccaaacaatggaacctacccattgtgtggataacaaatttaagattggctttcctgacttgtctagttcttttgaaacctgacttttaccaccctcagaattttgtgctgcatatgtgtaatgacattggccaacatttcctactgggaagtagccaaaatccagtgacatgctccacttatttctgtttgcaaatctacttattttctttagccatctttataggatgtttcaacaggtagctaaagaaattgacttgtaaatacatatgtaagtaagaggacaaatcagttatacgtgagaacacgtgtacatgctatgtaaagggagaagtgcagacagagaaaaagcaatcatttataaatcagggctgatgtatttgacagaaatcaaattttgcagctactaaaatgtcattaaacccataaggggataaattatgtagctgagagttaggtaaacctttcaagcaaaggatcagttagcaaatattttagggtttgcagccacacatttcctgtctcaacaactctattttgctgttatagcacaaaagcagtcatagacaatatgtcaatgaaggaactcagcagtgctacaataaaactttatttacaaaagcaggtgcgaggccagatttggcccactggccgtactttgttgatccctgatctatttgatttcctataaagcagaagatgctttgttttatcctacaacctacaagctgcatgcctttgatatctttttagtctttaaatttgatcagtaccctgtgccatttttgtgtcttttaatatcttcctttaaactactcagccagttgtgctattttgaaactgccaagtttgtttttcctgggcatgcaatccttccatatttccaagaactgccaacatcactaagaactgtttaattaaggcatcaataataaaacagttcctaaatctcatttggaaaaatgtagcagttgcattcaggcaacttagctggggcagcaaatattagaaagatcaaaatcttaattgcagcaatgaaaatgatactatttatttagcactcattatgtgattggttcactgctaacactttgtaccttaaaagagatggctcttattaccgtacgccccattataaatttgagaaattgagtctctgaggtttcaggtgatgtacatagtgtccaactctattagaagccaaagctcatcctcttaaagaccacgttggttgtggaggtggttttaggtgctggtgaacaagcaaaataacaactctaaacctcatctttctttctttctttctttctttctttctttctttctttctttctttctttctttctttcttttttttgagacggagtcttgctctgttgctcaggctggagtgcagtggcatgatcttggctcattgcaacctctgcctcctgggttcaagtgattctcttgcctcaaccttcctgagtagctggaattatgggcatgcaccaccacatgtgactagtttttatatttttagtagggatgggctttcaccttgtttgccaggctggtctcgaactcctgacctcaagtgatccgcctgtctcagcctcccataaacctcactttctaaatgggtaggtaaaggattgatcttgttaatctttaacatcccttcaaatatccttgcttgaaatcatattgagtcatcccaaaatataggtcttgagcatgttcgaggcactgctaaattctggtgacacagatatttttatatttgctttctagaaaaaagaaattgtatttctcatagatcatgggatatactttactaatctgaagaaaagaacaattgctacaaggacaaaggtattctttttaaaacatatgatgggccacaaagtttcaatatagcacaattcatgtatgtaaattattatatgtcatagtaatgtggctaattaaaacaagtgtcttaaaattttggtgggggatttcacttgaaagaaaaagctatggaagcactgaaaaaatatatacttttaaaaaacaatttaaatctgagaactaaaaacaaaatcctagttaatgcccaaaatgggtgtgtctggagaggttagcaagcaggaaaaaataagattagttatttgtgcttgagtcagtctgtgtaggaattttacggttgaaagcaatagaaacaagatatggcaaacataagccccagaaaatttattaggactgtgggtccacagagttgaaggactcacagaattaaaggaaaagtggcataccaggcttgggaaggtctcaggtccaaggatgcaggaagcttagcaaccacttttcatctggaatgacatggttcaaataccagcatcattttcttctctctgtttatcagtggctaaaattaaaatcctgtgagggagtgcccagtggtggaggtttatgtgcaagtaggtctatcccatgccaacaagagaaggtatttttttcatactggcatccttagggaaaggcaactcaagattatcctagtaccaagactgaatacaaatgggacaaatggattcccaaaaggaaactggagaataggaaggcacagacaaaaaataaagtgccccctactaagaatgtgacctaaaacaattaattcaaacatgagtgtatgcccagttcttgaatttatctagacaaataccagagtttattgtcaaatgatcaccgtcatattctatgtggccaaatctgatattagagaattagattttaggtttccaaattcctaaaatgcaaattggattcctaattttcctatcccaaacagtgctgagatataattacatactattaaacatctgttaaattaaaatgaaatggtgagggagacaaggaatatgcagtctttgagtattgctgttatggaggggtgaaattaattttcattatacgaacagaggctgtctataccaccattccaggaaaactagtaattgggttgaacgtaatgtggaatcaagtatttttattctatccactatgtgtgcctctgtaattaaactctggaagttcagtgagtttagtggcattcaaatgagataatatctggtgatgaattaagaacttcctattgtgagatcacatggacacaggaaggggaacatcacactctggggactgttgtggggtggggggagggggagggatagcattggaagatatacctaatgctagatgacgagttagtgggtgcagcgcaccagcatggcacatgtatacatatgtaactaacctgcacaatgtggacatgtatcctaaaacttaaagtataataataaaaaaaaaagaacttccttcactgttcctgccttaaggtggaaatcttccattcatttgacatcttaggactgcctactattatttgtcagtggtgaggttaaccttgggggtattataggaatgaaaaaagttatggtttcaatactagagaagaatttattctagttgagaaaacagacaaatctggtaatgtaatgacggaagcataaactaagcagtaggaagtgctttggaagcatagaataggctctttatttgacttaagattctaacacagagttcccggaggatgaagcatcatcctccctcccagaaacatagcacagcggttttcttagtgttaccctgaccagcagcattaccctcacctgagaacttggtttcaatgtggtctcaggtccctccccagacctactgaatcagaaactttggggatgaggccaaacacgctgtgttccgataagtcctcctggtgagtagttctgacctacttcaagtttaagagcccctgatccatcaaaatgactaagaaatatggactcttctatcagatcagcacttctcaattctgggcacaggtgataatcttctgatgaaattttaaagttcttgacaccaagactaaatcaagtaaatcaactctcaagggttgaggcatgggcctctctacacatgtatggacatagatatgtttaattctccaagtgatctgaatactagaccaaagtttgctaaattcagccttcaattactgaatgtctttcaagtgacagaggagtagtctgaaaacatggagatgtcaacaaggaaaagaaagagaaacaaacaaaaaaaaagtttttgaatattacatgccagacactgaacaaggggctaaggatacaaagaaagaataaagggaaataatggaggacagaaaaaggtaattggggggcggcaagagacacagaattactgaactgtgttctagacactctgcaaacatgacctcattcagttacaacctttcaagaaggatgctatgagtctatattaaatatgagaaaactgatacaggttgagcatttattattcaaaatgtttgggaccagaagtgtttcggattttatattttttgagattttgaaatatttgcatatacgtaatgagatatcttagggaagagacccaagtctacctccaaattcacttatgttttatacatgccttacacataaagcctaaaaataattttatattattttaaataattgtatgcataaaacaaagttttcatacattgcaccatcagaaagcaaggtgtccctgtctcagccacccatgtggacaatttgtggttgttcagcatttccatcactcctgactgaacttatatgctactgatatgcatttattttctcacacttacagtaagttcttaacggttgatatggtttggctttgtgtccccacccaaatctcaccttgaattgtaaaccccataatcctcacgtgtcatgagagggacctggtgggaggtagttgaatcatggggacagtttcccccaactctgtgcttgtgatagtgagtgagttctcacaagaaccgatggttttataagcatctggcatttcccctgctggcactcattctctctcctgctgccctgtgaagaggtgccttctgacttgattgtaaatttcctgaggcctccccagctatgcagaaccgtgagtcaaataaacctcttttctttataaattatccagtctcgggatatttcttcatagaagcgtgagaatgaacaatggtaaaaaatatgacatagcagtaatacagtgaaaatataacgtgttaggggtgaccaagcagcacagcagcctcagcagaaaccgggatcagctgttaaacaacagcaacaacaggcaatggcagactgaacaaattgggttttgtgccctgtattttgacagcaacccatcacgtgaggtcagggttagaattttccactggtggtttgcaggactttttgagcaggagtgctcaaaaagttttggattttggagtattttggttttcagatttttggattagaaatgcttgacaacctgtattcagaaataataagtaatttctgaaggccatgcgactagtaagtagcagagtcaagagccgaacccaaggttttctacttcctagttgctgggacctttctttgcttattgacaggtagcgtagcccagtgggcagccatgtgggctcagccagatacccccagttacaaatcctggtgctttcacttatgaactctatgaccatcagcaaattaaatagcctgtttctttctcactttccttctctgtaaaatggagacactactagcacacatgttgttacagtgttagaggagatgatgggtacatttagagttgtctgggccatagttaagtactgacgcatttgctaacataacagacatcataaaagaattgctgaactgttacaacagatgtctcttatcaaaagaaaactcagtgaaataagagatataaaaatagccaaataaactgaccacaatatgattatattaccaaaaattaaaagacttcaggtgaagtaacacagatatttaaatcaagatttaaagtagatgtcttgtgccagtaatctcacttttgtgaatctttttaacagaaatgagaaaatccttaagtggaaatacaattacaaatgtttccttgtacctttggaggtataaagaaaagaagagggaggaagaggaggacgaagaggagaagaaataaatcactggggaaaaaacacaaaaaataactttaatgtctactaattatgggatcattgaattaaccatagcatatctgtaatatacaatagtatgcaactatctacaaagttagttttcagccaggcacagtggctcacaccagtattcctagcactttaggaggctgtgtggggaggatcacttgaactcaggagttcgagaccagcctgagcaacatagagagacacccccctccacaatctctacaaaaaataaaaaattatatgggcatagtggtatgtgcctctcatcctggctacttgggaggcagaggtagaaggatcatttgagcctaggaggttgaggtttcagtgaggagtgattatgccactgcacttcagcctaggcaacagagtgagaccttgtcccccgataaaataaaaaaatgaataaaacgaaatttaaaaataataggtaagttttctccaaacacgcttagaaggatgtccatgatattactacagcaaaaaaaaaaaaaaaaaaaaagctactttaatttcactttatatagtatgattccattgagaaaatgtaaaaagtcaacacaggtttgtatacgtttgcacaagcacagaaaaaggtaggagaagtttccatatcaatttgatcacattagtgcttgagtgttttgaattagaaaagaggagattagttctgctaactttttattcattgttttttttttttgttaagtaaatgaagaaatagtgtgtaagacagggccaacatttttacatatttagctatatcttttatatgtctaactatatccctcccattatgagaagaggctctggagagctgcggtttgacacattcatctgttaacctccaggtgctagcacagataggggtacgtggataatgagaaactgtgtgtgttgtgttgctctgcactgttaagaaatttctgagtgaagcgttgacatgcagcatgaagggagagggattacttggcaattaccacccacaacgaataggtatgccttcattttctacttcagggtctttaagatgcaacggtgaaggaaaaaactcaatatagtcttgataatttagattttgtgtgcgaatgtcctgggacaaactaatccacctttttgtgcagtgaggtccttatttgcaaaacatgatgatttgggtcaggtttgccaatcagcactttcttttctccagccagggaaattatagagataaattagataaaacatgaatgttcttggattctgtagaaatatatgacatgcaaattacacaggttgcaaataatgtgctgtgattgaataaatcaagtgttattccaccgacatcagagttcaggaacttccaactgtgtatttcctcgagtctttctactgtgaaaacattttgtgatgcatatcctttggcaaaaatatgcttgcagtcgcaatcatggtcacctaacgatttgatcaataatcaactagtgtgaagatgatgtgagtaacttattacagggcaatgaagcatgcttagaatttattgccttatgtccccgcaaatgtgaaatacgggcaagctcattctgtaacaccttgaaatcatttcagaggtaatagattagtcagcttcacttagcaagcaagctgtgttgatcatttgtcatttgtaggtggactttttcttcccttttcctcattgtctcaagaatgagggtgatttaaggagagtctggcttctggatgcattttcaccctcacagaccttgtccaaaaactgggatctagaagactttgtgcaaagcaatcagatttcatttgctacagatggtattttggccatcctggcaaaaggctggctttcctatctgagtgctaaatcgatattccaatctggtcttttgggaaaattggcttgaacctgcagaagaaattcaaccaaaaaaaaaaaaaaaaaggaaaaggaaaagaaaagaaaatagatttgaatgtgagctgattccattgaaacttactgcttctagacttacatttttcttttgaatgtccacgaagtaggtcaaacacaaggaaaatagacaatgtctagttagacgtctcttaagaactagatctttctaaaaagactaagtctcaatggattttcctgaaaaatgctgttgctgttggatgaacaccatgagaatcctttcttcaagcagtaaatgtgagaattgctggcctcttcccgaattccaaaagttgggccagtgatactgacacaaccgtgttatacatgtgtcagtatgctggcagtttcaaaagacaaaaacccaacttaaactgtcttctgtcagaaataatttattggctaatgtaacagaaaagttcaggataatcttcaggtatggctaaatccaggtgcttagactctgtaattagagagccacctgtatctcttgtccttgctttcttctattttggctttagtcagcctttttattcattgcagcaaaatgtcctccagcacttctagacatccatcctgttagaaatagtaacacactataaagtgaatttcttttttgtaatgatttcagccaaatctttatgttgtgacttattggttatgcttatgtacattcctgaaccaaaagtggtatccaggtggaaaaaaatgctctgatcattcatgccttagtcagatgactacccttggagctaccctaaaataaattgattcaatctcacataaaccaaatggactagattacggagcatttctttccaaaggacaaaacatggactttactataaacagagaacaggtgatatgcagcaaaaatcaaccaaccaaccaacaaaatacatttgtccattggggatggagatgggaaggctactggcatcaaaatttattcacatccatcaacgttttctttggcgaggtctctaggggaataatcaaactgtgaccattgtatcaagccttaggaaaaaatattttaagccactttaacttcccttaccctctcccattcaaagccttactttagaagatgttcacaaaagtcaacttaatataacttacattgaaaattgttaccagttccttgcattttattcttgatgaaaaaattgaaaggtaccagtgatcccgacattctaaaagaaaaaaagaacttccaggattcatatacagcatatgaaactggaaaggattgtttaatgagagcttgagtataagagtgcttacatttttaaacaccaaattgagaagaggagtaatggttatattaaattttaatgttagggaaatgggctctgtcaggaggtatatggctggataggttataaagtaatgtgagtgcattcagactttgaatttttcctaaatgccatagaaaccattttacattagtcacgtctaacttaagagagagagagcttcagttcctggaggaaaactgcagctagaagtcttgcctttttatcccctatatggactcttcattattcagtgaacctcagaaacaaaagggcttattttaaagccaaaagatttgtgtccatgtcacagtgctggaattttaattctttctcttggaagatgaatacaaagtaggagaggttcaagaaggatgaaaagaccaaatgagtatcaaagaagaagttgaccctaaaatgtaataccatggctcatcgtctaattaaataaggatccaaatataggcttattaacaatgaggacctttctgtatgaggcattttgctttgaaacacgtctccttcaaagcagggaaaatttttaaatggcccctataatctatgttcttcagtttatttattggtcttaaaagggacctatataaaaatggacttttctgtgttttcatagcactttgtccatactcccatcagagaaactcattcattcattcagtctctcactcacttgctcatttaagaagtattcattgaacaactatgtgccaggcactgggttttcatcagggcacaagacagagccagtgctcttcagaagctggcaactgggaaataagatttaaaaaatagtaaacaagcaaacacacaacataatacacaccattattaagatactttaatttcccttaccctctcgcattgaatgcctcactttagaataggttcacatcactcaaatcaatataacttccattgaaaattattacaaggtccttgcattttattcttaatgacaaaatggaaaggtaccagtgatccaattgcttccatgctattttaagaaaggagaagggagtgggtacctgttatagatttaaagagacataatcaaatgcaaattgtgaaccttgatttgatccaggttttaacaaatcaactgaaaaggatgacttgggaacagttgggaacatttgaatatgactaggtattgaatgagattaagaaaacgtgtgtgtgtgtgtgtgtgttatgaaggaaatcttaggtttttttttaacatttatttatttatttaaattgacaaaaattgtgtatattcatcatgtataccatgttgttttgaaatatctacacagtgtggaatggctaaatcaagctaattaatatatgtattgcctcacatattttatctctttttttatggtgagaacacttaaaatgtactgttttagcaattttcaagaatagaatacattgttattaaccaaagtcaccatgttgtacattagatctcctacatttattcatcttatttaattgaaatttggtgttctttcgccattatctcaccaaacactccttccttaacctcggtcctagcaacccctattctactctcttcttctgtaagttcttttttagattccacatataaatgaggtcatgtggtatttgtctttctgtgcctaatttatttataatggtaaaagacaatgcttttccctaaaatctttaaaagaacaaggtgtttcactctcaccacttctaccccacattgcactggatgttctagggcaattaggcaagaaaatgaaatgaaagatatctatatgagaaaggaagtaaaccgacctctattcatagatggcatgatcttgtagagctatcatcctaaggaatccatcaagaagctattagaactaataaatacttccgtcaaggtttcagagtggtccattatatttctatatattaaaaacccaaagggaaaatgaacaaaacaattccatttacaatagcatcaaaaaatataaaatacttagaaataaatttaacaaaagaagtacaaaagttattctctgaaaactatgaatattgttaaaaaaattaaagaagatctaaataaatggaaagtcctattcagaacaagacagggcacaggcaatgtttcatgcaacaaagctttattgggtaaatttgtgccaaatactcttctaagacccggtaattttttttttaatgataagacctagttactgtcctcaaattttttaagaattttaacatatattttaattttcgtagtggttaacaggtctagaacttactagctgtttgaccttgggaagttagttaacatctttgtgcctttttctctgtctatgtgtgtatgtgtgtatgtgtgtactagcttattttggaaagttttaaacacacatcaaagtgcagagagtaataaattccccatgtatctgtcaaccagattcagtaattatcaactcatggtcaaatgtggtttttgtttaaaggacgtccctttcccctttatgcctcaactattgggttattttgaagttaattctggatttcatactattttcatctgtcagcccttccttgggtacctctaaaatttatcataaccatagcaccatcatcacacacaaaaaataataattctttaattttataaactagccagtgttccaattttctcgatcacatcatacacattgtctttcaaatcaggatccaaacaaggtccacacatcacatttgattgatatgtctcttaaatctctcttaatgtgcaagttcatatccctctctccaaccctcactcttgcaatttatttgttgggacaactagattgttctgtaaaatcgccatcctgaatttggttgattgcaccctgtatcatttaatacatcactctgtcctttgatttttttgaaaatcgagtcaagtcctcttcccactccaaggatgctacctaggccataggtggtgctatgtgtatcctgccaggaggcccagaatgtctggtgctctgcttcttccaggccatggctgatgagtgggtttaagtattgtcagcccaatccatctattagtaagtgttcctcattagcttttcacctcatgacttttgcagccctcgatctactattttagtaggagttggaaggtggtaactcctacatgcgttacctgcctggaacccttctgtgctgaaaacctcccctgagctattgtatggttaccttgagatacagtccacacctggatagcaggacaaatgcatgtttgtttccgtctttattcactggaattccaaaaagttgacaaattaggtttctttggtttgttggtttggtcttagcattattttttagtaataaaatagttctcctccttttccgtggtttcactttccaagtttcagttacccatattaagccttgatctgaaaatatgatctggaaatgaaaatttccagatataaaccattcataagttttaaattgcacaccgttctgaggagtgcagtgaaaggaggagttctgggtctggggcagtgaaaatgtaggataaattagaagcatcctgtagggtaggaaacccagaaagctgtgagactcctgaaattatgtcaaaaagactcaggacccaacatgaaggagcttcccatgaggagtgtgatgaaatctcattctgtttcggctccatcctgggcagttgtgaattatccctttttccagcatcttcacactgtcccccgaccctttgagtaactgagaagccctcttggtcatcagatgaaaacaacagcatatatagtcttcagaaaagggaggactactgtattatgagtgtattttttaacacatttgtttttcaatcttctttttgttttgttttgttttgagactcagttctttttatctttggccaaggggagctccttcatgttggctcctgagtctttttgacataatttcaggagtctcacagctttctggatttcctaccctacaggatgcttctaattcatcctacattttcactgccccagacccaggatcccccatttctcccaagagccctggttcttctcagaggaaaatgacattcaaagagcacagtctaggtgctggagttacctagtaatacagagctggtctttgcttattggtgttttcattgggcagagacaggaaatatgcttgcttcctaagaaaaaaatgcgtaatgggtttctactgctattagcaaattaaatttatggtttcaaggttattacttgattctttgatttaacatgtagttttacttttatgctagaaaaattggttcctaatgatattaacataattacctttttgttttaattcttcagctttgttgaggtgtgattgacaaaaattgcatacatttagggtgtacaacttgatattttgatatacatttatattttgaaatgattactaaaatcaagctaattaacacaaccatcatctcaaatagttacctattttgtgtgtgtgtgtgtgcgcgtgtctgtgtgtgcgtgaaggcacatgaaatctactttcagcatatatgaagtgtatgtcattattaactatagtcaccatgttatgtattaggtgtccagtacttattctttaattttaatcatgtttacgtatccaggtgcatatgattaatcatatatgtgcatgcatgtgaatgtgtgtcagaatgataccactataatcatttgtatatatgtatgattaatcacatagacatatatgtgtgagagagaaaaaaataccagttattactaaaataattttgcccttataatgtaacctattaaggatatacaatcaaattaccatgttttaaagtcacttaaaatattttttctctgagtggttgagataccaatcaatacccattaggctgacttgttttatttcactttttattttagggattgctttttttaagtatttgtttcatttttgttttaaaactgtgaaacttaaatcaagacatactcagggaagtttagcttacatctctgcctcttgacccgtttcttcctttaccctatggataacctattatttttcatgttctaatttgtcctttcattgattataagataaacaaatgtgtatatgcatttgtataatgcccattccttagataatatgtggatactatatactgttctataccttgctttttcacttaaaaatatattcaggaaatcactccatggaagagtattaagatattcccctcttttaagcatttgcatagtcctacatggtgtgcacattccactgcttattaaattggttgtctaccagtggacgtatgggttgttcccaatcttctgctgttttagataggacttcaatgaatagccttgtacatatggctttttaaaaaatatttttagagctatattttttggatagattcccaaaagagggagcagagcactagatcaaagggtagctgcatagataattgtgtcctaccttgctacattccacataccattttgttttctaaccagcaacgtttaaacatgcttctctccccacagcaaaaccaagagatgatttttgtcaccctaataggcaggcaataatatctcctttaccacaaaatggcagattgtcagagcaactcaagcaagtcagatgttacctaccactagactacactaatgattcaaaaactaaagcaagtagcaacaaagacacagcatgcttctctatagggaccccaacccatcagatgcagcttccagaaaaatagttctctttctcacattggaacatgttttgatgtcaaagtaagacaaatactaacaatacgtgtgatatacatcagctcagaggaagctttaaacactttggtgcttctttgtttttattctcttgttagtcatgcagagagacagtctatgcaacccagcttccattctgccactagctctgctctatatgttaataaattctgggccatttatgacaaacatggtagacaaacctggtgtatcttggtaaaagctttagaaagtttaaaaggagatctgtttaaggttaatcctcccagagtgagaggcagggagtcacagatctgctattgattctctcctttccaagtgatttttaactagcgtcttatttatgagtccagtttgagcaccttatattatgttaaagtatatttgtatttttactgtgaaccatctgttcatatccattgcttgtttttctcatagaattgttgaacttttttttagagtctttttctgtcttaagggtatataaattgcacatatttttttcctgttttgtaatttacatttttagtttgcttatagtgcaaaagtttatttttaagtaactaaattcagagtcctttccttttttgcatgcggactttgaattattattaggaaacctttatcataatttatagagagattcatcaatgtttccttatattaatatttgtattgtttcatttttttcattacatgtaaatctttgaccatttggaaatcatcattgcacacagtttgagaattatatctaactttatatttttccatagagtaatccaattatttgaacatcacttatgaaaacatccctttttacccaattgagttaaaatactgatttttttgtgtgtactaaatttgtttatccaattggattaatttctggatttctcttctgattcattgttctctatatccacccatgcaccaatatcacattgttttattggaaaggctttatatatgttttaatatctggtaggactggctatttcccattccaccattattctttttttttaagggttttcctgatggtttttgcttctttgattggccaaataagctttataataaacttgtctagctccaaaaaatgtttttgtatttttactggaatgattgttgaatttataaatcgagttacagagaattgacatttttataataccatttcttcaaatgacactgtctctttttttttgttcaagttaattttcgtgtccttcaggagtattttatagttttcttaatagttcttgaacgtttcttgttaagtttacttctatgttattcactcatttatctttatttttcttctctctcattatatcttctacagtttatcaacttatatacagtaagtcctcacttagtatcatcagtaggttcttggaaacttcaaccgaaacaacatataatgaaaccaatttgatcataggctggttgatataaatggtgactaagttcctacagcaaatttctggtcacaaaaacataaccaaacttcaaaataaagatcaaaacatttctaatattaagcactgaaacaaatgtgagctatacatacatttaagaaagattaataaaaacaagtaagacaattatttattcaatgattccagttcagggtctcagttggctggagcctgtccccaaagctcagggcaccaggtgggacccaacctgcccaggacaccatcccatcacagaacgcacttacatacacccaacacccactcatactgggaccatagtcaggccaattcacctaatgagcacagctgtgagacgtgggaggaaacttgagtagccaaagaaaaccctcgcagacacagggagaatgtgccaactccatacagacagtggccccagctgggaactgattattttttctcatcaacatagcgaaacagcactaaaggaagcaacaacattattcaaagacctgctgtacatgtaaaagctattggttttagtatgttgattttatacctgctactttaatatactattttattgtctgtagaaattttccactgttgtgtttaggttttccagatatataaatatgtcatctaacataaagatggcaatgatggaaactggggactaacggttgaaaaacgaatgaacagataccaccctcagtacctgggtgataggattaattgtacccctaacctcagagtaatacaatatgcccaggtaacaaacctgcacatgtaccccagaatctaaaataaaagttaaaattctaaataaataaaaactaaaattaaaaaattaagaaatgaaaaatttaaagtattttcacctctggaaaaaaaacacatcatttgaaaataggcatagttttgcctccttttttctaattcttacacttctaattactttttcttattgtgccagtttcttaaactgcaaaatgaaagcaataattttatctattttataattttgctgtgtgtattaaggatataaaatatgtgaaatgcttacagcaatgcctggaatgtaataagcccctaatcaatattgcataattatttcaacatatacgcatatgtatatgttcatatatatatatgaattcttgtgtttgataaaataagccctctagagttaagcagttttttctaatgtcaagcatttgcatacctgcaatttggaactctgtacattaaaatcactttctgaagagattagtctttgcaaaactttggtcatttatgtgtcatcttcccaagttttgccatatccatgtatcatattatttctattcttacttatttaatgcttttctttaaatggaaacgtcctcttttttcctttcgtatgtaaatatatatgtgaatatattatatataaattaatacaaatataatatgtcactggcttaaaaggagaaacaatatttttcagatacatatgaaaacaaaggcattagttttttgtaaaaaagttcaacacctgaagtcacttcacatccaaaatgttgggaaactagtgaatttatactttaagcatcagtctttttttcaccatgttagatagttgacaagcttaattttaaaatcctcttgagtggattttataatcagttaatgacaattagaatataaactctacaaaggtgagatctttggttttattttttgttgttgaaacagggttatattcatcaggtttctctagacggacagaactaataggacatatatatatatatatatatatatatatatatatatatatatccgaacttattaggtagtattagcttacatgatcacagggtcccacaataggccatctgcaagctaaggatcaaggagagccagtccgagtcccaaagctgaagaacctggagtctgatgctcaagggcaggaagcatccagcacaggagaaagatgtaggctggaaggctaagccactctagcctttttaggtttttctgccctctttatatcctggccgcactggcagctgattagatggtgcccatccagattaaggaggggtctgcctttcccaagccactgactcaaatgttaatatcctttgacaacaccctcacagacatatccaggaacaatacttggcatccttcaatccaatcaggttgacattctgtatgaaccatcacaagggtcttgctgtgttgcctaggctggtcttgaacttttgggctcaagcaatccccttgccttggcctccctagtagctgggattataggtgcatggcaccaacccaaaggtaggatctttggtcttattcactgctcaataaatatttgtggaattaattaattgattcagttatttactctcttcactttctttgtgccatgctttgtgggtgaaatgggaattgtgataacatgtttcactatgatggttatggttattgggcattccgtagaggaaatggaagaactgggaaactttgggtcacttctaggaaattcataaagaaataaagaatcccattgttcgtggctacttgtgtttttaagagcttttcctcaggatatttggctttgatactgaagcacgtcctcattcacatttttttcccttgcttctggaagtttccctgtaggttaatttgagccaggaggttttaaatttttgcagagggcagtgctgatgctatcacaatataattggaaattttaaaatgtggggtaaaatccagctagggtatatttggctttggttggatctgcaacttacataaccagcaataacttggtcccaaatgctgaatgttgcctataattagaaagacccacttttataattgagggttaaaattattgtaaccagtgtttaatgggattacttaaggtattcttataatcaagattgtgtaggcatcctgtttatgtcttttgaagtaagattcacaaaaattgtccctttaagaaaataaggccactttataaagcatgtttctcttatgttctactttgctaaatgacatagtttgtaagttttcaaagagccatctgcattctataattagagcagtatatttttcttccaaacatttgacaaattaaggatcccaaggtctcaaacattcacagcatgtgcataatgctagaagcttctatatatatcacttcaagattaggataggccattagtaggaaaaacaagattaaaagaaaaaaaagaactagacttggagcaatacttgagtttaaagtcatggctcagccattcaccagcttgggaaattctctgaacttcagtgggctttagtttctctgcaaaattggaagagtagaacagggaagataagaaagggtctgaaagggagagtagctcagttcaacaaatattttcccgagtatctttcatgtgtcaggttcttcctaagtttagatgagagaaaaatagaatagactccttacctttaggaagtatatagtctattttgcaagacaagaaaatgaaggtaattatagcatagagagggagagagtgtcaaaatgtaaaataagtgtggatgagaggccataggataagtagataaccatttcttcatttatttatacaatggatattgattggcaccctttctgtgccagagactgatgacactggagatccaccattgaataaaacaaaaaaatgcttctgctttcatggataagtgccatttcatacatgccgtgggttggctgggggcacaaggactatgaaaaagaataaagtggggataaaaaagcagagaaggaggtgagggtagaaagaggagatgtctatgataagaggatgcttaagccaaggctttcaggaggtaagagagtgagccatctgtcagaagtgtgttccagcagatgaaagtgtgaccttcaagctctgaggttggagtgtacttggagaataacaataaatgagaatggagcataaatattttagggcctcaccggccgtggtaaggatttcagattttactctgtgggtaatgggggccgtccggttttttagacaaagagtgacatgactctggcttctgtgtgaggcaaggttattaaggaaagaaggtgagacaattggacagataccagatgctatgactcctaaaggaaagggtacttttacatctggatgtggtgtaatggctggagagaggctaggacagtgctgagccatggcttggcctgtggaaactggggtgtggaagaaagtatcactctccttcaatggtctacagaaatacaaagactccagttgataccaataaatagaacagatgataaggaggtagattgaggaagtagggggatgcatggtagtgatttaactggttttccaaggagcgcaaggttttggaagaggggaagaagaaggaggtagagaaacataaaacagtacttggataaaaagtgttcacaggaggatagccggcctgaggagcttccattttctgtagcaaaaatacgtagctgggatagaagagccaatgatgataaattgagattcaagttccagtgcagctatgaagtctgtgaaggcaatttttcaataaatgctaatttaaaactacgtatttagaatttttcctaccacacgcaaatcctttaccatgataatttcatgcttcagaaacatattatctaaaataattaaagatttgggcaaagatttaattataaatgtatgtaatgcagcatcattaataacaacttaattttttagagtcaatgagtctagcagcatgcattgttaaatgtataatagtatatcctcacaatatatattagctcacaatatatacaatattgattatgtacaatgatatataataaaatggaacatatctatggtacattattaatcaaacaatgcaagttaaaaacaagtttcttattttccattaacatatgaggatcttcacatgtcatatctgagatttctttatcaggaatctgtggttgaggagaaagtaaaagtgatataataattttatatagtataaacacaacaatgaataaactacttcaaaaagtaatccttgcttaaatattgctccctcctcaaaaccagtgcccatcgcaataatgtcctagttgtgatacaaagttgacttttggatgttctaaatatgaggggacttcaaaaagtttatggaaaaattgaattaaaatataaaaataaaaaatacaaacgttaattttcaacatagcctccatcaagttcaagacaattttgtaagcaatgataccagccatttagtccatccctaaagaactgagggtcttgggaatttaaccatatcaatgcaatcttttttacattattaactgaagaaaagtgggtaccatttacaggttttataaagattaggcaacaggtaaaagtcagaagagccaaatcagaactctaagttggcagagcatggtggttcatgcctgtaatcccagcactttgggaagctaaggcaggagaattgctcaagccgaggagtttgagaccagcctggacaccacagtgaagtcttatctctgccaataattaaaaaattagctgagcatggtggcatgtgcctatagttccagctacttgggaggttgaggtgggaggattgcttgaggccaagtagttgaggcttcagtgagctgtgatcacaccactggactctagcttggtgacagagtgagaccctatctcaaaaaaagaaaaaaaagaaaaaaaaaagaactcttagatggatgcctgttgattccccattgaaagtctttaaaaattgcctttttaaaataaggggaatgaacaggaccattagtttgatggggaaggaccgtctggtgaagatttcttgggtatttttttttgctaaaattttggctttctcaaaacactctcataataagcagatgttatcattatttttccctccagaaagtcaacaagcaaaatgccttgagcatcccctataaaactgttgccatgatctttgctcttgactggtccacttttgctttcactggaccacttccacctcttcgtagccattgctttgattgtgctttgtcttcaggattgtacttttaaagtcatgtttcacttcctgttacaattctttcaaaaaatgcttcaagatcttgatcccacttgtttaaaattttcattgaaatctctactcttgctgcaactaatctgggtgcaacggttttggtacctattgagaggaaagtctgctcaactttaattttttagttagaattttgtaagctgaacttattgagatgtctatggtgttggctgttgtttgtgctgttagtcgtcagtcctcttcaattagggcacaaatgaggtgaatgtttttcttgcaaattgatgtggattgcctgtcactgcaggctccattttccatattgtcttgtcctttcttaaaacaacttgtccatttgtaaactgctgatttctttaggggattgtcctcataaactttgcatgaagcatcagtgatttcaccattcttccacagaagctttatgatcaatgtttgttcttgcttcaattttagcagaattcatgtttctctgatggggctctttttcaaactgatgtcttaccattcttagtgcctccaaatagatcccgttcagacatttgataacaaattagtacaattttattttggtgcaaaaaaaaattgaaattcatacatagctttttcataatacatatttttcatgacctttttgaagaccccttgtatctgaaagggatcacaaaaaggaccatatgtgttcactggttattgtaaaccacaaaaagggccctaatattcaccaatttcaatcccagaatgtggttctccatatgttgtctttcttgatgcatttggtgtcttcatatacacactaataaaggttctctcttgacctggttcatctatgggttttcttattgttccagtaccagggaaaggcagacaagtcttgacgagtctttaagtgagggcagagcaagatggataaaaatctaccaatttagattggtagattgtgatgaaggttcagatcttcatcatcctcttcgctctttccttcctcatcccgtcagagaggtagtataatatgggaattaagagccagactctggagtcagacttcaatttctaactaagcaaatatcctcgggttattacttattctcttcactcatctataaaatggagtaaaacattttatttgtttcacaggatggatgtgagtcttcaatgaggtggtatgtgtaaagtgcttacaagagggatgggcatatattaggctccaattttatgttagctaccatctccaccacacctgaaaccaacaccacatcttcatcatcacacctgccaccatgagcatcatcattcccaccaccattatgatcgccatccaatcaatggtgctgagtgacaatgtccactttcaaaatcaacccttctaaataattttcactgttagatttatttttaaaattatatttaagctcaccaggtgggccacaatatctaataatttagtagtaacttccatatcatactacctttactattaaatgtttagcattcaatagccatcattattaaacagctaaaatgataatattgatatttgacttgctccattattccatttccatgttttagataaaagccctgaatttaagtgttcgatttttcaaagtatttgagaataaatctatagtgttacaggaatttaaagtaataaattataccatataaaatgcttatcttccatttctgatccaaacaatcttgtatgtctgtcttcagtattaaaggaaattgaggcttattataccttattagggcagaagtggcctgctcaataattcttcaactctacttttttactaagacaagccatggttttgatgaggacaacaacatatccactaaaagtgtatgtttcccatcatctcttgaagataggtcttgccatatggcaaggtcaggcccagtgagctacgaatggaagtctctggctagaacttcctaagaaacacctaaagaacttaactttcagtactcttttgtccattctcctttttccttgctagaatgtagatgtaatggctggaacagcagcagccatatagttatcatgatgcaagcttgagaacaaagccatacattagaaacagtaaaaactgaaaaataggagactgagatgtaagaataatctgcattatctagactatctaccttcaggccttccgttaaataaaagagaaataagcccgtagtttttggaaccaaaaagagcccacatggccaaagcaagactaagcaaaaagaacaaatctggaggtgtcacattacctgacttcaaactataatataaagctacagtcaccaaaccagcatggcactggtataaaaataggcacatggaccaatgtgacagaacagagaaacagagaacccagaaataaagacaaatactcacagccaactgatgtttgacaaagcaaacaataacataaagtggagaaaggacacactattcaacaatggtgctgagataattgacaagccacatgcagaagaatgaaactggattcacatctctcacctcatacaaaaatcaactcaagatggatcaaagacttaaatctaagacccttttagacattggcttaggcaaagacttcatggccaacaacccaaaaccaaatgcaacaaaaacaaaggaaatagatgggacttaatttaactaaaatgcttctgcatagcaaaagaaataatcagcagagtaaacggacaactcacaaagtgggagaaaatattagcaaactatgcatccaacaaaggactcatgttcagaatctacaaggaactcaaagaaatcagcaagtaaaaagccaaataatcccatcaaaaagtgggctaaggatatgaaaagacagttatcaaaagaagacatacaaatggccaaaaacatatgaaaaaatgctaaatatcactaattatcatggaaatgcaaatcaaaaccacaatgaaataccactttactcttgcaagaatggccatagtttcaaatttttaaaaaatagatgaatagaggttggcatggatttggggaaaagggaacacttttacactgctggtggaaatgtaaactagtacaaccactatggaaaacagtatggggatttctttctttctttctttcttttttttgagatggagttttgctcttgttgcccaggctggagtgcaatggcatgatctcggctcaccacaatctctgctttccgggttcaagcgattcttctgcctcagcctccctagtagctgggattacaggtatgcaccaccacgcctggctaattttgtatttttcgtagagatggggtttctccatgttggtcaggctagtctcgaactcccgacctaaggtgatctgcctgccttggcctcccaaagtactgggattacaggcatgagccaccgcacccagtcagagatttcttaaagaactaaaagtagatctatcatttgatccagcaatcccactactgggtatctacccagaggaaaagaagtcattatatgaaaaagacacttgcacatacatgtttatagcagcacaatttgcaattgcaaaaatatagaaccagcccaaatgcccatcaatcaatgagtggataaagaaaatatgatgtgattatatatatatatacacacacacacacacacacacacacacacacacacactcatacacacacactccatagaataccactcagccataaacaggaacaaaaaaagggcatttgcagctatctggatggagttggagaccattattttaagtgaggtaactcagggatggaaaaccaaacgttgcatgttctcacttataagtgtgagctaagctatgaggacgcaaaggcataagaatgatgcaatggactttggggacttggggggaagggtgggagagggtgagggataaaagactacacactgggtacaggtgtactgttcaggtggtgggtgcaccaaaatctcagaaatcacctctaaagaacttattcatgtaaccaaacaccacctgttcccccaaaacctattgaaataaaaaaaaaaaaagaaaaagaaacgcctatttttaacctgcgtagttcttcttgcctctcttattcttttcaatatgatacacttactaaaatagactattcgaatttgccttcatttctatatgataggttaatgctaacatattgctttttcataataaaaatatttttcttattcttataaccaatacattaatacatttgtgttaagaaacatacactcttggccaataactgtgatagacattgtgaagaatgcaatgattctttcagattttgtatgaactggtaataagctgcttatagactgaacatttacaaaccagcgtgtagtttcattacattaatacattagcatccaaagcctggttattgcagaaaagttgtaataggaaatatctagccagatttcccctaggatattaaaacaatatattttgggcactgaatatttggtaagaatcaagactaaaaactgcatcttgcagggtgtcatgactttttaaaccccctcccctacacataaagctattttccaatgacaaggaaagtgcattttagatgatagtcctaaaactaggcatttcctgtgaaatacattactatacataggaaatgtcattttgagccataaatgcctgtgaaaagcccatattctgaaaaaaactatttgtatttaggtcaacaacgtgtttatttccctagatgttttttgggctttctgagtctatcagagtgttctgcaatccacagagcctgagtccttgtgggcacagatgtcagaggcatgtgtatgattaaaaacaatcccatctccagggaatttttggctaaattcacaagggtcatgttttaaggtgtaagaattccctcaatacggtatatatgtagtttaaacattgcaaaaaatgttaaggtataatattgttcataaaccactggatttctacaaataaacatggatctgggaaagacctggggattatcagtttttgtagcaaagtcctgccttgagacatttaatgttcataaactgttgcttcttttaatgagtataaacatttgcttctttaatatcctcatggtataagcataactcattcattcattcatttattcatttagcaatatagcttttccaggcacccttcttagtgcaaaagttacagcaattaacaagaaaaagaactcacatcctaattggaaggagaaaaacaaaaataaaaatttctaagtaaacacaacgtaataattttgggtaattccataaaaaaacaaagatataaaataaatggtagggacaaatcttgatagagcaatacgatgaagtcttttcaaaggaatgcatcttatcatagaccggaatgatgaacagtagtgaattatgcaaggatccacagagagggccttctttatagcagtaatagtaggagcaaggccaggcacaatggctcacacctgtaatcccagcactttgggaggccaaagcgagcagatcacttgaggtcaggagttcaagaccagcctggccaacatggcaaaacctcctctctactaaaaatacaaaaaaaaaaaaaattagctgggcatggtggtgcacacctgtattcccagctgctcaggaggctgaggcaggagaatcgtttgaacccaggagatggaggttgcagtgagctgagatcataccactacactccagcctgggtgatggagtgagactctgtctcaaaaaaaaaaaaattgtaggtgcccagaggcaaggatgaatttgggctgttcatggagcagaataaaaatggggagatttttggatcaggctgaaaagatacacagggaaaacatgtagggtttcaaaggccacagttaggagttgtcatgtacttctattctgttggagggattaggggcgagaagacacaatctaatttctaaaatgttattctggctgctgtgtgaaaaatgaatcaatatagggcaagagggaaccagggagactggtcaggtgactgtggccatcagataggaaagagatgcagtggtttagacctaagggaagccatagagattgcttacaattcatttagatgttgcactcgtgcatgaagaatattaaaactcacaatgatattttgaaaaggtactattattattcccatgtttcagatgaggaaattagagctgagagatatttaaaaagtttcacatggtcgtctagttggtaagtggcagatcctacactaactcagtgaaccttcaaagaatatgctcttaagtggcccattacaatgacttcaaggaaacagatgctgtagattttcacagaagggatgttgggagtgaagaccacaggctcagggtacgaaagcatctgactctcatctaaggaggaaattttgctccacaggcctgtcaagactataaagggtctgaggttttatcctacttgtagacaaagtctgatacagctggcagaagacatgatgcttttgggtcagaaacaaaagactgtattatgcatggtaaatatcatgagcctcatgtttgtgttggctcctactgccctccaagtctcatggttgggaggaccagggttgtctgcatagaggggaccaagcaggtttgcattgcaactgagaaatattgagcttgaggaattcactgctgttacaatagtgagcagtaagtaagcctacttgttgtctaggaggaaagattacctcatccctccaagtttctgactgcaaacagaaacctcaaaagctacctgggtcaagaacagtcagggccttgcattcttggcatggccggcaggaaggtgcaggagtgttcagagcccgtggccactgctccttcccgctcagactttcagctcacctcagagggaaaagagccatcttcggaagagccacttcctcgggatcgataccagaaattgcagcaaatttaatctcacacggttttagaaaagggcaggaaacgacaggaaatcagagtacagttgacccttggacaacaggggggtaaggagtgctgaccccccgtgcagctacaaatccaggtataactttgattccctgaaagcttaactattgatagcctactgttgactggaagccttactaataacatacacagtccataaacatgtattttgtatgttatatggatgatatactgtattcttacaataaagctaactggagaaaaaagttattaagaaaattataaagaaaataaattgacgattcatcacagggaagtgaatcatcataaagatcttcatcctcatcatcttcatgctgagtaggctgagtaggaggaggaagaaaaggggttggttttgctgtctcaagggtgccagaggcagaagaaatttcacgaataagtagacctgcactgttcaagctgtgttgttcaagggtcaactctactggtataacagtatgaattctagctgggtgtggtggctcatgcctgtaatcccagcactttgggaggccaaggtgggcagatcaaaaggtcaggagttcgagaccagcctggccaatatggtgaaaccatgtctctaccaaaaatacaaaaattagccaggtgtggtggcgcacgcctgtagtcccagctactcaggaggctgaggcagaagaatcacttgaacctgggaggcagaggttgcagtgagccgagattacgccactgcactccaacctgagtgacagtgcaagactccgtctcaaaaaaaaaaaaagagcatgaattattttggctaccagtaagcatattcacttgctgggctcttaaaaggagtgttttactttctcacataaaacagagttctagagaaaggtgatttgctggtgatggttcagtagttcaaccttaggctccaggtcagcttcttgtaattctctaaaccctccactcacagttacaagatagtcctgacacttcttagcacggtatctttaaccaaaacatttgaaagcaaggaggagtggtgcagagtatttcttttccaactctatcctcttatctggtgggaaactcattatcccagcgcccccgcagagatttttgcttttatttctcttctgtcacacctgggtcacatgatcacccttagattggggtctgcttctctctttcctgaggaatctctgccagacagttgaataaaattgaggctctatgtcttagtccttacaggctgttgtaacgatataccataaactgggtggctataaacaacaaacttttatttctcacagatctggagactaacaagtcttagatcaaggcactggctgatgtagcgtctgatgaaggcccgtttcctggttcataggcacaatcttctcactgtgtcttcacttcatggaaggagccagggagtctctggggccccttatataaagacattcatctaactcacgaggttcccaccgtcatgacctacttacctcctaaaggccgcatctccttctaccatcccattagtgattcggtttcaacataggaattttgaatatgaatatatgaatatgtgactatgaatacatgaacaaacagccagaccatagcataatgtgatgtaggaaaaaagttgctggcttttgggttggcctccttctaccctagtttctctctggtgtttagacaagggcattgaggaagcaggatgacccggcttgccatcatcactaaagcaagtggtggcttcctaggttgttatccagggataacaatgaaaaggattctgtcgtttacaacagcctggttgaagatggatacagagcctgccaattaatttggcaaacagctctacttcagtgaactttaaataaagagcacaaaagaggacaagtgggaatgattctgcaatctgactcaagcctggtgtgttcctgagtcactgaacagagcagggagtaggttctcgtggcatatgctgtcaatgggcagaaagtagaaggtagtggagcgaaagctgtttgcgtgcctggaacctgtcacaaaaatcccaaacaagcaaaatgaatgctgcgtttcccagtgggtgacacagcccagtattcagcacagtctgtttgcttgcaggtttagtcagcattattttcttccttttaataatattcaccatattgacagtaatttgcagatttttaagttctgcatatgttcctactgaaataatcctcctattttgctttcctgagaccttgttgaaaaaaaaaaagagaaggaaaaaaagaaaattgtacattaatcagaaaacatccttggaaaattctccaggcttttgcacataaggtctttcccctacggaaatgacaatgacaacattaaaaaatttattgttatgaatgggaattataatcatgggatattttttattgagaattattgtacactattaggtttgtaatgtattttttaaaggctttaaaaaaacttcttggtgtttttacttaccaaacacagcacacttatcacataatctattattgtcatttattaaaagtcctaagtgtacctagaactatgaatgtgtttttatgtggacagctgtgtgtgtgtgtgtgtgtgtgtgtgtgtgtgtgcttatttgtatgtagtaaatcttaaagggacatcaaggatggatccatataggcaactggttcaaatattggcccaaattacaatatacttaaactagagaattattgtagatccagtaggttctggtggttgagagtatggctctaggttctagtcagagtctgagattcccattcttaccctggtgtttgacctcagaaagttccttaatatctctgagccttagtttcatcatctactgattgacttagtaacagcaaaaacaatatagcagtaatagcagtaataatgatgagctgacactaatgatactattatctaatcgttcctgagaagaaagattttaagcacttctcatggtttcattcatttgcattttttccagctttattgagatatcattgacaaataataattacatacatattgtacatatggctttaaatgatgtatttaagttatacaaattgatattttgatttattcatactctgtaaaatgatgaccacaaccaagctaactaacatattcatcactccacatagtcaccattttctttcttttttcttcattttttttttttttttggtggcaagaacacttaagatctaccctcagcaaatttcagttatacaacaggatcactatacaatacagtcaccagttaacaacaatcaccatgctgtaccttaggtctccagaattcagtcattttgcctaactgaaactttgtatcccttgactaacatcgctctattttcccttcttccctcctcccccaacaactaccattcttctctctgcttctatgagtttgacttttttagattccacaaataagtgaaatcatgcagtctttctgtatttgtctttctgtatttggtttatttcacttaactttaacatcctttaggttcatccatgttgttgcaaatggtgatatttcctttttaaatattattaataatactaggggtttgttaggataaaatgtaatgtgatgtgtctagtacgatacttcatttattgtgactattttaaaatatgtaatagccaaactaatatgaattgaatgaatgaattgggcaagcaagtcaaaatgagacagaccaattatgcgtctagatccagccaaagagctccagtctgtatggttatttaattttaaaagcaatgccaaggccttctgggcatcaaagtacatcctaccctgctagaattcacaaaaacatgtgataggaaaggatctcttgtctagattcttttaaagtagacactgaaagattcccacatgtttgaatgtagatgtggctatttctagctagaaccgcaagagtttaattaaatatttgcacaacagattttttaaaagaacgttttggaaggagggttgcaccacctgctgcagttccacgtcggctcatcgcccagttggcgttttctttttccgtgtctggcacacagtagctgaggacacccggccctccccacgggaaaggttcagatgggctttttgtgcctcctggtttcagctgagttgctaagcccttccctgttgactttttaataatgaacacagaaaactggctaccattcattcattcattcattctccaaagaatacccagagagatctttgaagaaagtaagtcaaatctctctctctctttttttattttatttttttaatgtttaaaagatttggcagtttctcatggtacccagaagaaaagtccagccccttaccccaccagggtcccctggctcgcctggctctgtcacacgtcacactctccgtgttgttgcttcagctgcccctgacttactgcctttcgctgaagcggtcaaactcactcagccccaggccttgactccagcaacatgtttttctgcaccccttccacaagttactcagctcagatatttctccccgggggaggctgctatacccaccctactgaacgttactctccccagtgcctagaacagtgccagacatgtgagtggtgctggctgttaattaacttaaattgcatgtgttgcgcttctactatgtgcaaactgttctctttttaaaaaagacatttagggccaaacacagtggctcacacgtataataccagcatattgggaggctgaggcaggaagattgcttgagcccaggagttagagaccagcctgggcaacagagcaagaccctgtctctactaaacactaaaaaaaaaaaaaaaaaaaaaaattagatgggcctagtagtgcacgcctctagttccaattactcagggggctaaggtgggaggattacttgagctcaggggttcaaggttgcagtgagctgtgatcttgccaccacactcctgcctgcaacagagtgagatacttaacaacaacaaccaaaaaaagtaggcatagaattagaaatgagcattcatgagattttaagtgaccccttagaagaaaaaaaggggcagtctctctaaacctatcctggttccaggggttaccctgaccctcctgactccccaaaaagaagaagagaataatagcaatggctaatattttgatccatatgtttgtctttaaatggctacagtagccaggcaggtggaaatcaacctgattttaaagaaaggagaaaaggtggggcttgtagccaaattcaagggtcatgcctcatctaaaataattgaaattcattttttcttaaaaaggtagcttttgccactgatttggctggctggtttctgattcttgaaacagtgtttactctgccaagtgctctcctatgcacgtgacatatactctttcactgaacatcagttcacagcctctctctgaaggagagactgttgttgacatcatttccatacatggcacttgaggtttataaagcagggcaaatttcttctgcaaagggccacataataaatattttaggctttgtgggctatagagtctgtgtcgcagctacttaactctgcctttgtaccttaaaagcagcctcggacattatggaaacaatataactctgtctacaaaaacaagcagcaggttggatttagcctgctatcgtttgccaacccctcttatgggtcataggtaatttgcttgcatttaaatagctgttaaggccggtcgcggtgtctcatgcctgtaatcccagcactttgggaggccaaggcgggcagatcacgaggtcaggagatcgagaccatcctggccaacatgatgaaaccccatctctatcaaaaatacaaaaaatgagctgggcgtggtggcacgtgcctgtagtcccagctgcttgggaggctgaggcaggaaaattgcttgaacccaggaggtggaggttgcagtgagccaagatcgcaccactgcactccagcctgggtgacagagcaagattccgtctctaaataaataaataaataaataaataaaaatagctgttaagtggcaattggagtttggacaaaggtggtcctgcttcccgattaccagattaccatcttgtactcctgtctctccttctgctggtccatccagtaggtcaggggcactataattggtaatagctgtaataaatatttattgcatgcttgctatacaccaggcattttctatgggacctaccaaacatctatccatctagctgcctatcaacatcatctatctatattcaataatttatccttacaatgttgaaggcagatgccacacccgatatctgaaacaaaaggctaaatttattgcttgctaagcaagggagaactgttctggtaaggcttagtctctctctgagcaagcagaaaaggctgcactttgcagggtttggggctcatctttttaagggtttggggatatgtggagttgaaggattggtgggctttttgaagcacatggttgaggagctgctgtcagaagagcaggtttgggtgagttttctttagatagttttgatgcagggcaggtgagccccagaggcgagcttagcccatgggggttattggctttgcctatgaaagaattgtagggtaagccggaagtagaagaaaacagctttactgaagaggcagtgttacagctccagcagcgttccagctctgtgactgcttctgcagagcagggctaccccgtaggcagagagtagcagctcaggacagttctgctgtcatattcatacctacttttatttatttatttatttttattatttatttatttatttttgagatggagtttcactcttgttgcccaggctggagtgcaatggcgcaatcttggctcactgcaacctccaccgcccaggttcaagcaattctcctgcttcagcttcctgagtagctgggattacaggcatgcgccaccacgcccagctaatttttgtattattattagtagagacggggtttcactatatcggccaggctggtttcaaacccctgacctcaggtgatccacctgcctcggcctcccaaagggctgggattacaggcaacagccaccatgccaggccatacctacttttaattgcatgcagattaaggggtggtttatgtagaagtttctagggaaggggtagtaacttttggatcattgggtcattgccatgaaaaggggcagcagcttctgaatgttgccatggcaatgataaatcaacttggcacactggtgggtgtgtctgattggaaagttgcttctgccatggccctgttttagatagtcctcaatctggttctgtgtctgggtcccacctctggagttgtgtcctgtgtccttcctcagtttgggatggagttgcaaatcatttctggtgattacttctgcctgggatggagtaggaccaaagtacaatcagtaatttgtttctcttgaactagattctaagaactgttgatgcttatgacaattctataaggtaggaactcttattattcccatttcatgtacgagaaacctgaggcacatggaggttgcgtggattgtccaggttcttaaggctgttaaggggtcaaaccaggatttttaaactgaaagtttggctccagactccagactcttagccaggattctcttctgtctcccatggctagtgtttgctttctgtgaatgtcacaagttgatcacttacaggcattaaattaattcctagtttgcatctgtagattttattcgtgttagtccatcatttgttctcatctccattccatcttgtaggtaacaaatgaccacttaaagaacatctacaaggccaaattcctagatttgaaatgcagtgccatttaaggtaattgttcctaatatttttagcttctaaccaaaaagtcaggcttgcttttgctgaaaggttaataagcagaaatctctacttcacagaacatcaggacagatgaatgactagatgaacgataatgcaaaattatagcctagtttaaccctactgggtttgttcttgactcttagatcaaccttgcaaaaggttaaatgggaaattaagggaatagagaagtctatctctctacaaatttatgttccacctcctgcagctcacagcactaaacagtcatggcttataattatagcagaaagaggagaattataactagagagtgataattgtctcctactcaaacacagacaggctcagagaacagaagacttggactcagacttattttccccaataactagatataaaatcatcagatataaaatcctgcaaaatgggctgaatctatccctatgtattagtttcctaggactgccttaacaatgtaccacaaactgggtgacttaaaacaataacatttttttgtctcatggttctggagcccagaagtctgaaatcaaggtgcaacgttctgaccgaagcctcaacgggagaatccttccttgcctcttctagcttctggtatttgctagcaatccttgcattccttggctcgcagatccatagcttcaatctccgcctctgttgtcacatgaccttatccctgtgtgtctctttctctgtgtctcttcttttcttataaagccaccatttatattggattaaaggcccaccctacctactatgacctcaccttaactaattacatttacagtgatgttatttctaaatgaggtcacatcctgaattgttggaggtaggacattagcctagactttatttctaaataaggtcacattctgatgtgctgggggtaggattttaacctctcttttcagaagacatgattcaacccataacacaaggattccatatttttatttgttttaggatgataaaattgccttcttcattggggtactaagggaaagtattgagatttaagtgctttgaggaaaaagtgctatgtaattatttaacatatcactgccagattaatccaaaagatgagtaccaattcacgagacagtctttatgaagcctagaattctttaatgctgactccaccatcttcctttatataggagataagcttccaaagatgcatttttgccaaaatagtaagtaacttcaaagtaagtgagatatacacaaaaggatcataatttctgacctagatgtgattctgcagcaagtttcacaaattgctttctttatttataggctggacacttaagagaaaacctgtttctccccagagatgcaaaggagtgtttcttttgattgttctggaagaaaaggaaggtttcatcaacacagactatctatatattttttttcaccaaacttatagaaaagaatgacaattcagaccacaatttaatggaggatgcaggaagtacactcaggcctcttaaaagtaaggtttgcatgctgaaaaaaattcccataatcttgctttggattttgttgctcattgactcatctattcaacaaatatggggcacactaaatgtcagacacagacatcagaaatgctaggatatataagaagtggtccatgccacaggtgagtggggagtatatgttaatgagacagccatgctatgataatttccactgaagaggtgatgcaaaaatgctgtggttacaactcatgccattgacaaaaataaggaaaaggttttcttcaggcagaaacaaaatcagggaaagtgactatgtgtattagcctgttctcatgctgctaataatgacatacccagtactgggtaatgtataaaagaaagaggtttaattgactcacggttccacatggctcgggaggcctcacaatcatcgcagaaggtgaaggaagagcaaaggaatgtctcgaatggtggcaggcaaagagagaatgagaatcaagcaaaaggaggttccttttataaaaccatcagatctcctgagacttacttactacgatgagaacagtatggggggaaactgcccctatgatccagttacctcccaccgggtccctcccacaacatgtgggaattaggggagctacaattcaagatgaaatttgcttggggacacagccaaaccatatcactctgaaaaggccaaggagtatagattccatgttatttttctctgtgtagctggagtgtagagttgagacgtgtgaggaaagtgggtcagtgagagacgaggacagagaagcaggctgggccatgtgtagatattttctttatgtcctgcaaagaagtttgactctactgttgtagagtaaaactttttttcatttcattaatgctatttgcttttcttcttattatttatttatttatttttgagacagggtctcactctggtgcccggactggagtgcagtggcgtgatcacagctcactgcagcctccacctcccaggctcaagcagtcctctctcttcagcctcccgagtagctaggactacaggtgcatatcaccatgctcagctaattattttattgtatttttttttgtagaggtacggtctctctatgtctcccaggttggtcttgaattcccggcctcaagcaattctcatgcagtggcctcccaaagtgctgggattgcaggtgtgaaccactgcacctggcctatttttttcttattttaaattaatctgagctttttatacaaaatgtaaagtgtggaaaagtagcaatataaaaattggaataatctttaatttcaatatctgcagataaatttttttgtgtttagtatataaccttcagtcttttttacagttaaataaatataatgtatttatttcattttcagtttacttgttaccatgtttaaatttctgtacttctatctatctatatatctagagaattttgtctccattttaaaaagaagattaactcttctttttaaagaagacaggttctagagttgtgggtaatatcaagatagcttttgccaaatagttttgaactctgaccattcttggctatagaattgattcagtcttgatgtattgcaacatatgatttgattcagagaaacaaatatatatttccttttttatgagggggaattttaagtggcaaatgaaacagaaaatgtcttgggtagatgaagaaaaacagcagggtggaagcattgcattgattttctgaaaataagcatctcgcattatttaaacttacagcctgaccatgttaaagatatgacaccttaagcctaaaaatgctgtaaactgcattcttacaaggcacataagctttgctggcaatattgcaagaatgtcagataatctgcttgaacaattcttagatcaaaataatatcatattatacatcagacattttatatctccttgaaatttaagatgatgataatatcattggaaagaatcaaaatagacccaatgggcgttaggtaaaagaactgtgcacatgaatgtgggattgtacattgcctctcaggctttgtctaactctaagatggtttaaaattttttgacatgaaaaatcagtagtttgtttcaatttcaacaatatttaatgatatccacaaatagcactaattaagagaattcaaaatagtaaatcaaagtgcgttttttgccttgtcttaaactagagattgtatactacttttaattttcttgttttcttaaacaaacatagagacaaggatcttgctatgttgcccaggttaatctcaaactcctggcctcaattgatcttcctgcctcagcttctcaaagtgctggtgttacaggtataagccaccatgcctgaccatagactatattttaaaattcacacattgccacaaactaataacttttatctatggtgactttcatatcttcaaagataaagaaaaattacttaagtgtctagagggaaaaaatcaaattatctgtaaagaaataaaattcagcgccttctgggacttctaggagtgggggacttaagacaggccttcccattggtaaaagatcatttttaggaagagataaaaccacagcttttatatagatgtaaaaatgaacatgtgttaaatattttactttactcaaataaggatccaggctgatgttataactggctcgaagggaaagtcaaaacaacacaatttatctggagtaaaggaatatcaagatgaattgccaacaatgacacaaactgttttctcccagggtgggaggggagacaatttggacctccaccagataagacatactttgcatatctactggttacctgcaatttatagagttgtaagatagctcaaagtaaaggaatagagctagactctgataacccaaaagggtatgttacagatcatgcatagtcttccatggaaacccaattttttcatttcacaatgccctccccctcctcctggttatggtgtcttatctttcctgttataccagccgtctgcaatactaacttccagaattagatgaaatgatgcctacatatttaggagaaaaaaaaagagaataaagcaagtctataagcccaaacaaattgctattactcttcaaaagacaggtactttcccacgacaataacatgttctatgaacctgagatctttagctgtttggcccactactagtgacagattctctttattgttgtctgatacaattattacagccctctttaaaatggaaaagtatacaaaataatgaatacagaattcagcacagaacaaatttttatgtagagtgagaaaataaatcatttaataaatcataaatcataaaaaatcataactcccaagttacaatttattttaaagttgataaccacatgttacaaagtctagaaacatggcatattattctttttttggtaaattatgacccaagcctctgcagtacctttcccctacttttttatgggcataccttttaatcatttcttcatgtgacaattattttataagattttctagagggagaatcgaaagcaaactccgtctttcttctactatgattggtgatctgtattttgagggcagttttgtgcgctgttctgtctggatccatgagacttcatcaggacaagatgtgtcaaataagctgagatgagatttaatatggtggcactcatactttgaggatggtacactataaattcaaggattctgaaattccgtttctcataattctcaacaaaagagaaatgaaaatgtgtggtgcatttattgtcacttatgctatcttgtcgattcctaataatagagatctttgtgtcagggttttccatacactagcgtctgactgtgaacattcaaatgtcatttctcctccatgtcccctgtacttttggggtcaggatcacatctcttttggatataatttctgtcctctcactcaggttggtcacttgatttgattttgctttcttctcccacttcttgaagcatattacactgtcccttgttaactcagacttaagagtttaatggaattttaaatatataaatgtaatttctgcccaaggcaaaagacttggcatattcatgtcatgatgccaggatagtcatcctagtaggcactgagaatctctcaataggcaatttctataccagaacagttagcaaaaaagtgaacacatcaataactatgaatcacctaaatatatcccactaaaaccaaaaataatgtatcctaaatttatctctctcttagccagatccaaaccaaatctatgattactctaccaccatctgatgaaaaaggaagggtaacaaacaggcagtttgtggggagggagacagctatcctatgtaattgtagttacaatgtgtgtctgtgtgaagatattgctagtaaccctccctcatttcctgccctattcccagtgtcttgccctttacatgaactaggcacttaataaatctgtgtttaaggactaaatacattattgataaaagaaggatatattcatgcgaggtttttgttgcactcaagaatggctaggacatacagaaaatacttttcagaaggtttttaaaaactagtattcaatttattaaaattataaatgtaaaagtaaaactagctcttttttaacctttcagtgtagttcacaaatttattccatttgtatattcagtagattttaacagtcactttcaagggagctttgacaatatttggttccttttacaagctgaaacaccaataacattttcaacagctgttataaatttaatgtatttgctctctttaatgattttaaaagcctggcttaataaaaacagctttctgaatatttaccaagtctttttcattgaccaatgtttaaagttataaaaatatgtgttctttttaacttggagattttttaaaaattatgctttaagttctgggatacatgagcagaacatgcagatttgttacatgggtatacacgtgccatggtggtttgctacacccatcaacctgtcacctacgttaggtatttctcctaatgctatccctcccctatcccccaaacccctgacaggccccagtgtgtgatgttcccctccctgtgtccatgtgttctcattgttcaactcccacttatgagtgagaatatgcagtgtttggttttctgttcctgtgttactttgctgagtatgatggtttccaacttcatccatgtccctgcagaggacacgaactcatccttttttatggctgcatagtattccatggtgtgtatgtgccacattttctttatccagtgtatcattgataggcatctgggttggttcctttgatattgtgaacagtgctgcaataaacatacatatgcatgtatctttatagtataatgatttataatcctttgggtatacacccagtaatgggattgctgggtcaaatggtatttctggttctagatctttgaggaattgccacactgtcttccacaatggttgaactaatttacacccccaccaacaatgtaaaaatgttcctgtttctccatatcctctccagcatctgttgtttcctaaagcaatggcaacgaaagccaaaattgacaaatgggatctaattaaactaaaaggcttctgcacagcaaaagaaactaccatcagagtgaacaggcaacctacagaatgggagaaaatttttacactctacccatctgacaaagggctaatatccagaatctacaaataacttaaacaaatttacaagaaaaaaaaaaaaccccatcaaaaagtgggtgaaggatatgaacagacacttctcaaaagaagatgtttatgaaggcaataaacatacgaagaaaagctcatcatcactagtcattagaaaaatgcaaatcaaaaccgcaatgcaataccatctcacgctagttagaatgacgatcattaaaaatataggaatttttaaatttcttaaaatatttcaaatgcatacagtatgcccacatttactatttacagaaaaatagtattactatggttttgttagtcataatttttatgcttaattttaaaatgcaagagatgtgttgccatttaaggaaagtagttaccattccaattaactgaatttattcatgaccagaggtttcatccagaacagcaaaagatttcctggacttttactggctatcctgctgacactcactgagcactgttttatagttttcttttcccgtttccataacttcagaatgtagccaattactttattttctcaaattcaagttatacacgttcactaattcttaagtctattcactaggctctatctctctgtaactcttctagtttttcaagaaagttggtcactttatttgattttgcttttttccccccaacctcttgaagcatattacattgtcctttgctaactcagacttaagaatttgatggaattttgaagacataaatataatttcttcccaaggataaaacttttcagttttacgatattactttttaacataatattctcaaatctatacaactgatggagatgtttataatgatatttggttaaatttggtatacctcacatggcctttgtctgatttgcattaaaactcatgaggtcattctcctggcagaaaaataaaggtatgtttcctgaagaaaaagtagacaccctcctgctgttcataagaaagcatcaaagtaaataattgcaaggccaggcatggtggcttacacctgtaatcaatcccagcactttgggagaccaaggtgggcggatagcttgagcccaggaattcaagaccaggctggccaacatggcgaaaccccatctctactaaaaacaaaaattagcagggcgtggtggcatgcgcctgtggtcccagtcactcaggaggctgaggctgagacatgagaatcgcttgaacccagggaatggaggttgtactccagcgtgggtgacagagtgagactctgttgaaaaaaaaaaaaaaagaatttcagagaaggaaaatggcagtattgaaaaactagaagtgctcaggagagatataagatataatttaatagtaggatttaattaaatgttataataatagtgaacaaaaaagaattttgggtttcaaaatttgagaacaaaaagaaaatacagggaaaaaatgaataatagatttatggactgaaaatctcaaattgagcctggcacagtggttcacacctgtaatcccagcactttgggaggcagaggcgggtgaatcacttgaggtcaggagttcgagaccagcctggccaacatggcgaaactccatatctgctaaggtacaaaaatcagcttggcatggtggtgcgcgcctgcagtcccagctactcgggaggctgaggcaagagaatcccttgaaccagggaggcagacattgcaataagcagagattgcaccactgcattcccgtctgggtaacagagtgagactctgtctcaaaaaaaagaaataataataataaaaagaaaatatcagattatagcaatagatactagaagaggtaggcataaaacgaagtatgcttaattttccatcatatatgtttatatacttacaaaaccaaatacaaatgtcaaaaataattattgagaaagcaggtgtgatataaaagcatcatcatctttatcattataattccatatcatatcagtgaaatctagaaaagaggtaggatcaaggttaaagaaaagttgcttgatttttcatcttctgtaagaacgtgagacttgaaaaaattttgacataaacatgaagaatagattaaaacattgtcataacattatagaatgaagtgcctggaaaatataaataggctgaaggagaggaagtaaacttttcatctactcttttgggttcagtcgctaggacctgcaaaataaactaacaaaagacagattaacaagaggggaaaaaaacagtttatttatgcatgcaatgcacacacgcaaacaaattcagagacaagtaactcaaagaggcagttaaaatttcagaagtaaatactgtcttaatagataaaggggagggagagaaaggcacttatggaaaaacaaatgacattttggattttcaggagaatgaacaggaaataagaacgtttttaaaaatacttgtttacacaggaatgagtggacttatctacttcagggccatgaaactcccgtggagaaaggatttgggataggttttgtgcaggttttccctcctgggactagatctactctaaaaagaattcatggcagccttgcttcccagaagttgctgctttgatttacatgagagaagaagctcctaggtggcttttcctttttctgcatttgttgaatctcaaatatcttcagccttatttaatctttatactgtctctgggatccaagtgtgtccctgtcaaagtgttaactgctaactccctaaggagatcatcaaaataacctatagctcaagaagagtcaagtttattgttgactgcagtatgagaagacagtctcagtagcatctgtaaagaggaaacttaaatgtgggatatatctaaatgatatctagaaagtgggatacctgtggggtctcagtggtctgatttaaggtaagtcttgctatgcgggtgcctgactggaatttaggagtctgtgatataacagtggagaactgatggatgtggagaggcaattttgaggtgaatcttcaaaaaacggacaatcaatcattggatgaaaccccttgagcaatccctggtttaatagcgagatggggcacttgttccttgttctgaagagaacaaggtgaagtctattgttcagataatggattttcaggaagttcttgaaataaacaataaagttatgtgcaacttcattttttctgggcaagaatttcctgcctagaattataatgcataataatgtcacgttaacatgaacagtaagttgtacggatgtagatggtaccagtagtcagcaacattttttttaacatcagcattattaaaaattaaaaaggaaaacatgcctttaatagaaaaaaggagaaagatgaaacataaaatgagcataaaagtagaaagaaaaaattgggagggcaacagaaagaccaaatacaccaatacctgttaaaaataaaaatggattaaactatccagtgaaaagatacatacaattatacactaattgaaggagaacatactataaaaatgatacctagggattgaaaataaaggatagatttgccaggttatcagaaaaacattaagaggaaaaattaattttaaaaagcagaattcaaagcaaaaattattaacgttgcaaaggaagttcgttttattttggtgttacaccgctgagtagaaatatagagccatgtatctttatgcatgaaattaaaaaattatcaaaatacataaatcaaaaagtgttggagtgggagcatgtgggaggaagaggaattaaggatgagtatgggctgagtgcagtggctcacgcctatattcctagcactttgggaggccaaggtgggtggattgcatgagcccaggagttcaagaccagctggacaaccccatctctattaaaacaccatctctattaaaaatttaaaaaaattatctgggcatagtggtgcacacctgtagttccagctactcaggaggctgaggagcgaggatcaccggagtctgggaggtcaaggcttcagtgacctgtgattggaccactgcactctagcctgggtgatagaacgagaccctgtctcaaaaaaaaaaaaaaatgtttgggtctaaagcactaagagatgtcaattattgagtgaatgacttaagaggtgggtagagaatggctgagtaaatttggggagaaaagggaacagtaagtttggaggaggcttagaaggtatcagaagacggcctcccaaatcaaatgtgagaaaacaaagttaaaaaggatgtcattctgaacatcattgagagttgtttggttcaaggagagaaagcatgtgcaagaattcaggatcctgacaaatacactggtatttagacccagacagcaaacagctacagatttccagtagaggcgcaaaagcgtattacctttccccatctactgtgagcttcacggctgacactcctatagccaaagacacactaacaagagaaaagcataacaaatttatttaatgtaagtttacatgatatgagagccttcagaaatgaagatccaaagaaacaaaggaaactattttgaggaagagagtggaagttttggagaagtgtgtttggatcaaagtgggtggaatctaatggtaataaactcagggaacttagcaagccgtgaattttttttgttcttgttgttgagatggagtctcgttctgttgccaggctgcagtgcagttgtgtgatcttggctcactgcaacctccgcctcccgggttcaagttattctcctgcctcagcctcccaagtagctgaactacggcgcacaccaccacgccagactaatttttgtattttttgtagagacggggtttcctcatgttggccagacttgtctcgaactcctgaccttgtgatccacctgcctcagcctcccaaagtgctgggattacaggtgtgagccaccacacccgggagcaagccctgattgttgagattcctcttggcctaggtctgtgccattccttctctcctggtatagggcaggacccccctggagtaagaaccttctgttctactttcagaagaagtaggtcagaggattctttttacgaccttgggggagaaaagtgggagaaagtcagagtgaccttcctgcttttgtaggtttctcagtttccttcagcttaaaatacacagtatgccaaggtgccatattttgggatatcctgttctgagccccagcacaaggatcagagaaatgcaaattccaatcagactgcaagttgagtgggtggtgcagacttctgaaatgcaacagaagaatgaggacgttgaatgtaaattgaatccagggacatgatgcgagcaacctggaagagcatctctttggctcctctgtggggtccgtgacatggaaactctaacatggggttcagtgacgctgggaaagttgctgataagaatcaaccagcaccctgggccttaggaacctccagcctgagaagcagaccacctgtcaagctaatgtgaataatagtaatcattgttttgttttagtaattagtgatgacgggaacttctgaagcaaaagacctcatgccttgcatgaactgagctggtacttacagggtatgctttgtggaatccaggaagatttagaattatagatgtagggtatagataggcaaagtagagtcaaaactatagaattaacattttgttacatatttaggcttttaaaatcaaagaatttagtccatttcagtgaaagttttttaactccacatacatacacatatacgtacacatacacaaaagggtatgtgaagaattgatttaggcttctgactaaattggaatgttactaagcattgagatatttaagaaatatttaggctcacatatttacccatttttaaatacataaaaattatttgtattagggaagattctatacgctaaggtagacagttgaagtacttaagaaggaaattgaatatattccctttataaatacagcttaaaatgttttaaggtattgaattaagtttggaaatgaaagcaatcatccttccaagactccctagaagtgacaggcagattttgcagaaccaataaatgctatactattgttttttagcagttgaagttaaaaggaacaaccaattaaaacaaaaaactttattttgaaatgcagatttgcagaaagttgcaaagatagtacagaaaggttccctctatctttcactcaagttgccctcattttttcttttgtcacaaggtttgtaaatttgtaaattccgtaagttgaatattaccaaaaataaatgaaaggaagcagagctctggatattattttttcctgtaaacacacaaacacacacgtgcatacgtacgtgagaattcatactcaatccctctgaggacaataaaaaacctcattaacagtcatttatattggaacatctgggctgagtttgagagggcggaggggcatgtagacagagctgtggaagaatcagcagagctcgctggtccaggatgtacactccacaaggtctcatgtagtgagaccttccttctcccttccttctccacgcaagggcttgagacgttaacctctctgtgccacgcattctccttggtgaccgtaaacaataatggtggtgcccgcctgccaccgggactgctggaaggatttgatgagcaagtgcatggcaaactcctggatcatgctcagcacacagtatgtactcagcatacgtgggctgctattaccataaatagggttgtggaacctgagagagaggtgacaaagattcactctttgaccaaactctagccagggtcctcttgttacggtaggtagttaggcagacatgagcagggcaggagaggccccccgaccctcaaccccaaccaggaatgtcaggcgcccatcaggtggtagtcaggcagttgttaagccgtctctctaaactaataatttctggccgagagtggtggctcatgcttgtaaacccagcacttcgggaggccgagacgggcggatcacgaggtcaggagatcgagaccatcctggctaacacggtgaaaccccgtctctactaaaaatacaaaaaattagccaggcgtggtggcgggcacctgtagtcccagctacttatgaggctgagacaggagaatggcgtgaacccgggaggcggagcttgcagtgagccgagatcgcgccactgcactctagcctgggcgaaagagcgagagtctgtcccaaaataaagaaagaaataaataaatacataatttcttgcagccagagcccgggaaaggcaatctcccaggagacagaaaaacttgaaactggtgattagcttcctgataaaatctcaggagtagcgtgcaggctcaagcatgcacgctaagtgggataatggtagagtctaactggtctataaccttataggaacacccacctggtaagggaaaaatgcctcaagtgagcacgtgcacaatgtcagtaaacacactgtgcacgtggcccctccccagtactggcagcccctgcgcatgcgcttgcggacagcctaccccaaggggagaagtaactcaagaccccagaagtacgccaatatataaaacctcacgttaaaggtcaaacagtgcacttgactcgctcaagtcacccgcctggccctcttccaagtatactttacttcctttcatacctgccccgaaaattttaataaactttcactcctgctctaaaacttgcctcagtctctcattctccctatgcctcttggttgaatttcttcttctgaggaggcaagaattgaggttgctgcagacctgcaggatttgccaccactaacactctgagccctcttctctaccaggcctcaaccttggcctataaaaattgccgactctcagcacaaaccatctcatccacccttctccccaactaaaagacttaaaccaacactaacatcctttctaacagctcaaggttgcacccaaaccatgaccggagcccttcctaaagtgcctgcctaggaaagctccaagctaccagaaaaatgtactgtctgtcctacctaacacctgatataggcacctgacctttcttccttatagtagttacttaaaggacttccaactgtgaatcctttctccatccctttgagatgtatgtgtatctccttaaatttaggagtgcttttctcaaagacctgaaagccattcctttgaaaaatgtaatcatcaggttggatagggcctctgcctcccaggctctgtgggaggacagaatcctaatttcctcaattggcagctaacagactcagctggccaaattgcatttacattcaactctctgtcattttcacttccctgaccctactgtagccacccccacctcccctttctactcttcattctccctttaaaatgtccagtcacctccgcacaaatcaaagttgagttcagtccacattggaccctctttctgattgcaatcatatgttatttattaaaatctgtccttaccgctttagtctccagctttgtttatctttgacagaaatcacagttcagaaatgtatttgggaagccgatgcctctacaaggcagtggaatcctagagaatgtgtgtagagtgagaaaatctaagagcactttcaccaaaccccaaagcacaccagcatttaaggtatagaaaaaggaatagagcctgcatacacaagcaaacaaaaaatgagcaggagaaggcttgaatgaaggaggaaaaatgatattgaaggaaatcaaaatactttaccctaaaatatatatattttgagatgcctgttcagggggccagcaaacagaagcaacctgcacagctgtcttctgtggggagatttgcatctgtagagaatgtgcattgaggcagccaacccttcccttgtcctgatctagagaagattaactgagagtctaacaccttgaaagaagaaacatttaccatctattctgatggctgctacctgtttggtttcatttacacaacaagacaacctttgctagccaagcctcttcttctttgcctcccatgacctgtcttgccactataaatggtttaccagctaatatggtttggctgtgtccccacccaaatctcatcttaatttccataattcccatgtgttgtgggagggacctggtgggagataattgatatatggggatggtttcccccatactgttctcatggtagtgaataagtctcatgagagctgatggttttataaggggaaaccccttttgcttggttctcattgtctcttgtctactgtgatgtaagatgtgccttttgccttctgccatgaacatgaggcctccccagccacatggagctgtgagcccattaaacctctttgtctttataaattacccagtcttcggtatgtctttatcagcagggtgaaaacagactaatataccagcataacctgtttttcgccatgctctgagcccccattctttctgtaatctcaggatggtttataagtttctgaactccataggcaagttggggtattcactctgtggttctctcccatgtgcacgttaataaatatgtatgccttttcacctattaatctgccttttgtgggctgatttttcagcaaaccttcagagggtaaaggggaagttttctcttagctcctacaatagtgtgaaaagaaaaacttcagccaaattaaatgtaaaggagtttaatggagtaatgaatgattcgcaaattgggcagcccccagaatcacagcagattcagagagactccagtgcagccacatgttggaagaagatttacagacaacagcaaaaaaggaagtggcaaacagaaattggaagtgaggcacagaaacaactgggttggttacaccttatttatttatttatttatttatttgaacacaggttgaacacttcgcagtgtatgcgtagctgaagcatggctgctgggattggtcaacactcagctattgttacaggtgcatactcctcaattaggttttcaatcttgtctacctattaagttaggttgcagttcatccacaaggactcaaatatagaagtacagagtccttcttaggccacatttagtttgctttaacaatagaaagctatggtcacaaaggaagtggggataaaaccgaatgtccccaaacagatctgtgtgtggacacttgatctatgaccaatgagacattgtagataaacatggaaaggtggctgctacaactggtttccgcatggaaataaatgaaattggattccattcttccatggcacctctctttcctaataaaacaataattcccaatgaattaaagacttgtgtaggaaggaaaaactttaaattatggaagaatacaggataatatttttataacattaggatactgaagaatatattaaacaaggctcaaaaatgactatgaaagaaatgattggtaagtttgatttcgataaaaattaaaccctgttcattaaaatacatcattaaaaaaaagagaaaagatttttgtaacactatttttttttttttttgagacagagtctcactctgttacccaggctggagtgcagtggcatgatctctgctcactgcaacctccacctcctgggttcaagtgattctcctgccccaccctcccaagtggctgggactacaggcgctgaccaccatgctctgctaatttttgtatttttagtagagatggggtttcaccatgttgcccatgagctcctggactcaagggatccacccacttccgcctcccaaagtcctgggattacaggtgtaagccaccatggctggctgatttttgtaacacttacaagtgataaaaaattttatagtgaattttacctatagtatatatcaatgaagtatttctataaataacaaaaaataaataaatagaaaaactggcaaaagacatgaacagtatcccacagaatataaaacgtatttagaaagtatataaatgacaatgctcaacccctatggtcacagagaaatgaatattaaaatctcatgttgctctccaggggagaagaacatctggctagcaggattgcaaaggtccagtttggcctgtgaggaaagagcaggaaagtcggtgtgctacatctagaaagccatggagaagaagggagaatatgatcacagatatagttaagggtcccgatcattaattttgatgtcttataattcagtcctggatttaagaggtcataaagattgataataataaaaaaataagaaatttgagcatatagtggtcaaactaatttttagagagggaaatgagaggaaagtataagatgtttgaaacaacaaatatttaatttaagttaattcaggcaacttttattaaacatctgctaagggccaggccctctgtcagggactgaaaactcaatgataaagaacgaaacactcattgccatagaagcagccacatgccagtgagatacaaaagcaagtaattatcagtatcatattcaatgctcataacaaaagcaatgattatttgcagacttatcatgctcaaggcccagctcttggtgccttaagcacatttttactaatctctacatcaatcttacatgactaacaatatttgttcaccttttacagatgagaaagtagtaatttgtttagagcaggatttcccaaccccagcactattgacatttggtgccagataattctttgctacggctgccctgcacattactggatgtttagtagcatatctggtgttgaatcaaatttagcctcaagctgcctccttatgtattttaagttccacctaaaggtttttctgtacatcgtgaactataacaaatgcagatataaatagaccgtaacctacacttgtgccagtcactgagttttggccaatcaattgtagccaactgttcgaaccatgttcaaataaggcaaaaatgccaacctgtaacccatccacttgtttctggattggctacctcacttccattttctgcccatcactttcctttttctgtccataaatcttccgtcacgttgctacactggagtctctgagaaaactgtagctcaggagactgcccaattaatgaatcttcatagctccattaaactttaatcaggttgaagtttttcttttatcactggcctctatccactagaggccagtagctcctctccctccatagtaatgacaaccacagtatctcccgaccactgtctcctgagtggcaaaattgcccccagtagaaccgctgattcagagacacaggaaatggtggcgcaggaattccaacaaaatgtttgactcccaaaaccgtagctgctggttgtttttgcttatctgtttggattgatttcttcatctagtatacaatgcctttatggaaataggtccatcttgaacactaacactggcatttaactatgtaagtgtaaggcaatgcagtgaggaagaatctttattcacaagtggcttatgctggaggaagatagaagtgagacgatagccaggcatgggctcacgcctgtaatcccagcactttgggaggccgaggcaggcagatcacctgaggtcaggagttcgagaccagcctggccaacatggtgaaaccccgtctctactaaaactacaaaaattagccaggtgtggttgtgagcacctgtaattccagcttctcaggaggctgaggcaggcgaattgcttgaacccgggaggtggaggttgcagtgagccaagatcatgccactgcattccagccgggatgacaagagtgaaactccatctcaaaaaaaaaaaaaaaaaagtgagatgataatgatatagatattattttaggtttctgttattcattcaacatctcagggcacatagaatatcaaataatagactgcaagaactgtctgtgttgctttaattccattcattgattcatccatccatccatccacccatcaatccatccattcagcaatgccaggggttgtcctaggaactgaggctctttgatgtacaagttggaaaggtccctgctcacacttggtctgatggggaggtggagaacagacaggagatatgttaatgtattattaaacaagataatttcaattcgtgataagtgctttgaaaaaaatacaagttttgtgaaggtgagtgacttggttggagggagggtgctaatttgggttcagaggtcaagaaatgcttctcagagatgatgcaagctgagacctaaatgcaaagaaggaggcagccatgtgaaaacctgcaggaagagcatgcaaaagaggggaacaagcacatgttaagatgctgaagagggagtgagtttggtgtatttcaggaatggaaaggaaggtaataccaggggcaagagggaggatatgacatcaggaaggtggaaggtggataaggacccaggcatttgtgcccttgtaggtcatgagatgagtgtggattttattctgtgtgccaatggaatatgatcttgttggggccactccaaaaggaaggccaaacgttacctttcacaccaccaaaatactaatgcaatgtcctacatgttcttgtttctatcagtcatagttatatgtttacagttatttacatagactgatgtgagagttaaaatgtgaagcttacaggggaaatcaaagaaatatttaaaatatattagtttagtttttattctccctgtagagtttctgcaaaatagactttttattgcactagtgtcttagaaggtctattgagtatttgatttcatttagaaaagcccacgagcacctgtatttttaagaattctgatactgtcaatgactgtcagtggttttagatattttttagaaagatattattgcagtgatgatcttattccatattttagacataacaatgtaagacctattgcttgtaatagggataaaatggaagtaatttaaacgtctatcaatggagaaagcagaaataaaacatgttattgtcatataatgaagtatgattcagcagtttaatgaactagatctccctgtattcaaccagtgcaggtctctacagaatgaggaggggggaaaaggtaggttgtagtcaaataggtatagaaatatatgattttttaaatacataaataattcaccatatatatttttatttgtatgttggattgaaaagatacgcatgaagtcatcatcatggtttctacttgagaaggaaggaaatggactggggagaaatatggggtaattttaactttatttgtaacattttatttaaatcaaaaatcggaaataaatatgacaaaacattgatatttgttaattctgaggtcttctttttatgtttttttgagacagagtctcactctgttgcccaagctgggtgcagttgcgtgatcatagctcattgcagactcgacttcccaggttcaagcagttctctcatctcagcctctaaggtagctaggacaacagctaccttccaaaatcagaaaactgtaataacatcatgcgttaaacacaacgattgagtgcagacttttttgtgaaacattctgtagttcagtgtggtctgtgtcttcatggagagattgtggtttaggaatgtctgactgaaactgcctttgcaaaaagtgtaacagtgagaaaattctaacagtgaaagagatctgaccttgcttccaatctccaagctaccctcgtttattcctgagcgtaagccaaaccagctttgggaggagcctaatctatagtttaactttgaaacaaagatgataaccgcccttctcccaaaaaaaccccttcttgccttgggaccagactgtctttaagactgcacattgtgcacatgtaccctaaaacttaaagtataataataataaaaataaaaataaaaaagaaaagaatacgatgaaaaaaaaaagactaacacattagtcacaagattagaaattatggtttaggagtcatgcagctacaggtcacaagatttcaaaccttctccatttctcctagggataacatcactgttgtaaaactgaaaattggtacttgggatatttttttcagaccctgcattatgatgtaccagctggcaccacccagactggtaatctggctcaaccagttctgtgatcccacccaggtacagaagacagcaagaagaacctacttcccctgaaatttcatctccaacccaacaatcagcactctccactccctagcaccctacccagcaaattatcctgaaaaaaatcccagtctccaaattttcagggggactgctttgagtaataaaactccagtctcccattcagctggctctgcctgaattacactatttttctattgcaattcccctgtcttgataaattggttgtatctgggcagtagcaaggataactcattgagcagttacatgataagcatataaaaatgtgccttatatccttaagcatcagagaaataaatattaaaaccaggatgaagtatattttactgctattagaatggataaaattttaaatgactgaaaataccaaatgctagtaaggatatgagtaaatggacctcttgtaattgctgaccactttgaaaagctatttgacagtttcaggcaagttaaacataaaccttatgacccagcgattctttccctaggaatttactcaagagaaatgaaaaaacatttatacaaagacttgcataaaaatgttcacagtagttttattctcaatggctaaaaactggaaacaatcaaatgcaatcattgggagagtgtataaacaattatggtgtctgcatacaatggaacactatataacagtcagaaggaattagataattgatatacataataacatagatgattctcaaaaacattatgctgataaaaagaagcaaagaaaaaaaaagagtaactactgttcattaatactgtgtttcattgatttcagttctatgaagttctaggatgaacaattggtagcagtagaaattaaaacagcagtttgctcctggggtgagaggcagatgactagaaatgggcatggggaaaatgtttgagttcatggaaaggttctagatattgattgaggtgttggctacatagctttatgcttgtcacaacttgtccattgcagatgtaattgttttatattttattgtatgtaaattttgtttaaaaaattagaaaataaaaaccaaggaagaaagattatggcatgaagaaaacattaaacaaggggttttatcttgccttttgaccccaaattccataccctagaatttattctagaacagaaaaaaagacccatgcacaaaatgatatttattgactcactaaatatttattgagcaccttatatgccaggaacttagggcctaggggcataatggtaagctaaaaacacaacaaaaagcaataaacaaacaaacagtaagaaacatgatgtagagtttaatgagaaagaaagtcattcattataaagtcacctaaatcaatacagaatcacacctgtgttaggggctgcaaagaagtgcataatgatatggcagcattgagttgaaaatgttgatcttgtcaggaggttggaaagatcatccataaagaaaagataatagggctgggatgtgaaaggcaaataggggtttgaggaggaagagtggaaagagtttggatgcatagagagtagcatattaaaatgtcctggcaccagtttgggtcttctgagaaggaaaagccaagatgagactcaacatgtgagggacctatttggagaaaacacctgtgaaggcaggggacgtattaattgggattccccagagaaacaaaaccaataggatatatatttacatgtttatatttacagtaaggaattggctcatatgtttaaagacaatgacaggtcccaagctctgcagttggcaagctggagacccaggagagctgacagtgtagctccagcaggtttgcaaaccaggaagagtctgaaggcaggaaaaaacaaacagaaaacgaacaaacaaaaacaatgtcccagctcagcaggcaggcagaagttccctctcactcagcctttttgttccattcaggccttccactaactggatgaggcccacccatattaaggaaggcaatcaacactattcaagtgttaatctcattcagagacaccatcactgatatggtttggctgtgttcccacccaaatctcaacttgaattgtatctcccagaattcccacgtattgtgggagggacccagggggaggtaattgaatcacgggggctggtcattcccatgctattcttgtgatagtgaataagtctcatgagatctgatgggtttatcaggggtttccgctcttttgcctcttccccatttttctcttgccgctgccatgtaagaagtgtctttcacctcctgccatgattctgaggcctcttcagccatgtggaactgtaaagtccaattaaacctttttttgttcccagttttgggtatgtctttatcagcagtgtgaaaacgaactaatgcaatcacagacacactcaaaatgatgttcaagcaaatatctgggcaccttgaggcccagtcaagttgacacataaaattaatcattgcagggagcaagtaggagtagactggggaaggctttagaccaagacactgatctgatctgtgaagggagagagggaaggaaggaatgggtaggaagagcttcagacctcaacagagagccaagaaattctcaggccaaaggaaatccctgagtcaaagttgttcgttagacagggtctgaattgagcagaaattggtgattttggtaatcctgccgtactctatcttaggctgagagcagcctagtcaaagtgttgactgacgtgaacaagcacagtggacccaaagatgtggcagctggaggatgttaccaaagattctcctaaaggaaactacatggctatcacagtcttattgtgataaagggcaatgttgactatgaagaattatggaaaggtcacatggagaaaggaaagagcagagctgagaagagagagatgtcctagaaggaccagggagaagtcttgtgtttcatgctatgaatatacatctgaggcaatgatatgttttaaacagtgttgggaagtaattagggttattgtttgaaaagatcactggcagaaccatggagaatgaactgaagatacgtcatattagtaaagagaaagtaaattgttcttccagccaagagatggtagtatcacggtctagggaagtagaaatatgtagaattggaagtgtctaaagagtatttgaggaataaaagtaaacaagagttgatgatagattttgtgatgattgaaaaataggcaagtatatgagatgctcctaggttttctggattgtagaggtggatagaagctagtagcagttatgaatttagatgaggctggcatcattggctagctacctaaaaatcatccttgatgtcagtaagatgtcatgaagaaaatgcaatttttcttaatgttcgcaatgtcattaatcttttttttcattgtagaggctaaacacagcaaaatagttatttctccatcttctgttgtagtcacgaggctacaaagtatgtaaggggtatgtgttagagggcttctggggacatgtgtattttcagctaaaagaagagatgcaaactctaaaatgacaaaacaaatatttactgctgataaaccaactaaggaaataaaaatgaataataaaaaattaaagtaatgtttaaaaaggaagacaaagggaaagtgagaaagaggaatagatggaacaagtagaacacaaatagcaagatttgttcttgctatttgtttaactataaattaaacatatcaataattacattaaattatagtggtctaagtatctcaaaagaaatagtcaagatagcataaaaatggaagccccaactatatgatacctacaaaaatcaaccacaaaaccattttaaatgaaaagatacaaatacatgaaaaacatatgaacaaggatatacaggccaaccctagataaaggaagatgaggtgactatgttaatattcaacaaagatttcagagcacagactattagcagaaatagtaataaagaagacatacaattctaaatgtttatgcacctcataacagcatttcaaaacgcatgaagcaaaaaataacaagaagaaatagacaattgcacacttagaatcagcaagtccaacaggcctctatcagtaattgacagaacaagtagatagaaaatcatcaacttgacctaactgatatttatagaaccctgcccccaattacagtagaatatacatttctttcaaacccatacagaatacttaccagagtgatcatattctggatcataagaaagtctcaataaggaactcaaatatacaaaatatcttctttgacaatgatgaaattaaatgaatcaataacagaaaggtatgtggaaaatcctcaaaccaaataatacacttttagtaacttacaggtcaaagaagaattcaaaataaaaaacagaaaatattttgaacttcatatatggaaatacaatatattaaaatttgttggataccactaaagcagtaattagtggaaattttttagcactatgtggcagtattagcagagaagaaaagtctccaatgacctcagcttctatgctaagaagctacaaaaagagagcaaatcatacaaaaagcaagcagaagaaaggaaaaaaaaaaatcagagtgaaaatcaccaaaataggaaaaagaaaaccaatagagtaaatctatgaaaccaaaagatggttcttggggaatatgaaattgataaacctctaggcaggtagcacatggaaaaaagagagaagaaccaaattaccagtgtcaatgagatggccgccatcattctacatatataaaaggataataagatagtatttagaacaatttatgccaatacattagttctaaacacaatttgaagatgtgcctccattttatgcactagtaggaaaaaaacccactaacttaacgttttcatatcaatgagcaattacactttttgaacaagcttcattgaggtataattgacatacaccaatctgcacatacataaagtgtattttttattttgagttcttctttgacccataagttactaaaagtatattatttggcttgaggattttccacatatctttctgctactgattcatttaatttcatcattgagatgtcacgggtgcatctcgaaataatggacaagtgccttgaaagacagcaactaccatatgattcagtcattccacactgaggtatttgcccatgagaagagaaagcttgcatctgtacaaacactagtacatgaatgctcacagcagctttatttacaatagcctaaaattggaaacaacctaaaaggtcattagtaggcaaaaggatgaacaaattgtggtatatttgtaaaacagaatactacccaacaacaacaaaaatgagctatttggtacacttacaatatggatgcatctcaaaataatgctgattgaaaggagacagataaaacagaatatgtaagtataattctgtttctatagcaatctaaaatatgcaaaaatgatttatagtgacagaaagcagattggtggttgcttagggactggaatctggtgagatggagaaagagactaaaaaggggcatgagaaaactttggaaagtgagggatatgttcattatcttgattatggtggtgatttcacaggtatatatatatatgggccaaaacttataaaattttacactttatgtatgtgcggattgttgtatgtcaattatatctcagtgaagtttgttcaaaaagtataattgctcattgatatgaaaaagtaagttagtagtattttttttcttactagtgcataaaatggaggtgcatcttaaaattgatggcatcttagattttataaaaggcggcaataaatgcctttgatctgagattctggtgcctgagctttatgctattttccagctaaaaacatactaagtgatataattggcaatactggatggggaatcaggttgggaggatcgtgaatttgtttttaggcctgttaagatcagggcattttggttagggctgctgttgcccctcagtagcttcctaactggtcactacatcttcttcttaggttctctcacatccattccccacgcagcagtatttcttcctttgcaatagactcccaaacatggctgcattgcataaagcccacattttgccacctctctgaagatgaggtcatgtgactaagttctggccaatgagataagagtggaattcacatgtttagctaattatagtcaccactctaagaaaggagtccctaaaattgcaaatgggtctgtcgcattacattttaaatgtgtctggctttttaccagcctataattcatcgacacagaaactaagttttcaaaataaaaacattccagacacaattacatggtattttataagtgaagttaaaatgcttattctggagatggcaatgttgctgaatgctaatccccaaactgaagcagtcttcttctgtctttggacaagccatttagtctttctgcatcaggtccctgagctgtgaaatgtggataatattacagggcttgagggtgctgtgaggattaattaacattggcagagcactttgaacataagactttgccctcttcacacattttatccagggacctcaacagactgtaccaataagggtggtcccatttatctctgttttccagatcaggttatgaagcagggagaaattaatggcttgcccaaagtcattcggtgaaccaggagaacagccctgaggagtcctctggaatattgacttctaatcttcctgcaacaaccattagatgcatgcttcgttttgaaaaagggtcttagaaataccaaatacccgtgttatctagttacttctctctggtctttttcttgtgtgttagcctagatttttttttggatccattttgcagtgacctgcagagaggagggctcttctcaccagaaaagaaactcagaaaatatctgggagagtttaatgatcagaagagtctttatggttatccccatcaagttcactggaggcatatgtttgtttttgtgtccttagtcataaaacttaagatgtgagacccacttgtgcagaaagaaacagtcattctggttcttaacaatttcatttggaacttatttttaaaaaatcacacaggagaaaatgaaaatctccactacttctaccaataattaataactgctgctaatatttgatgtagagatattcagattttttggtcataaaaagcacattatttaaaaatgggaccatactgtatagataatttataacgtagggatcttgctattctcccagttccagccaccctgaccttgctctaccatacgctattccattgtttatggcatcccaacaccctctctacctttgcctagacaacagcacctcttccttctcagctcagctccctaactgctccatccctcaccttccaaaggggtcaggtcctgtcttcttgttctgcccttgcataatatcctgtaattttccttcgtgcataattttacacttaacagactattcttataatatctctcactcccagtggacagccagctccatgagggcggagagtctggtctccttctctctactctattgacacctaggtacttagcatgcctggctcaaattgtagctcaaataatatctgctgagtgaacaaataagtgaaatttttcccactcattttagtggccatgatttggatttgtaacagaatggtaaatgtgactcttcctgttgatttcattttagtagaagccttaaaggcccagggggcaaaaacatttagaaaacactctaaagcaaggtgctggaccatctgtgcagaaattgccaaaaatagtagttcaaaactgttttgtctgcataagttgatcctgcacctccagcctaaataagacattgtgggtaaagagattaaagaggaagatttcttggcagagagctggtcttctctttcccacagggacagacaggggagcttgccctttaccttaaaggaatggagccgctttcaagagaatcactcagaaggccagatgtgcatctcctcatgtgctgaggacacagggacaagtgccagacccatccgctaggagtctaaatgtggaggctgtgggttggctagttgccctgactatggcagagcaaagagccttagaatagagctgacagtccatgtacaatggcaacaatgagtgagattttcctctggctggttaaacatacagagggaacaactagaggttatcatagaatagatgccaccaagaggaccacccagaagtgcaaacggaactcagcatccatctggggcactgggatcttggaggtggaggaggtaaaagagtagccagactgacaaaagaattgcagatggggccggacacggtggctcacgcctgtaatcccagcactttgggaggctgaggcgggcagatcacctgaggtcgggagttcaagaccagcctgaccaacatggagaaaccctgtctctattaaaaatacaaaattagcttggcatggtggcgcatgcctgtaataccagctatttgggaggctgaaccaggagaattgcttgaatctgggaggcggaggttgtggtgagcccagagtgcaccattgcactccagcctgggcgacaagagcaaaactctgtctcaaaaagaaaaaaaaaaaaaaaaaaaagaattgcagatggaccttctctaatggattcacaaaatctccatgacagaaagagcaaaatttttattcattcacctgctacctatagggcatcaactccaaggcaaaactgagaacaaacaaaactttcccatttgtttatcatgaacaacattgcagtggacattcttagaactaaatatttgtgcctttggaaacatgtctggaaatggtattgttgaagaccaaggataggcaattattaaagtttttagttttttaaaaataaatattacttttgctccaaaacgggtatatcaatggatataaattcacattctcatcagcagttttatttgtctttttgtaaagatattcaggtaatgacttttagatgtaggtttttatatgatctcaccatttccagtccaatcccttctaattcatttctattcatcagacaggctaatatttttaaaaatataaatcagatgccacttcctgatttcattcttttaaataaaatgcaatctccttgctgtggcctgcaaggaccagaactgcgttgccccttcctccctggttctaggactacatttcccagcactccctccctccctgagcttaagccatgctgtccttcccacagccccttgaactcgccaagctttttcctgcaagctggcctgaacccttcaagcacccttctctctagctggaatgcacttcccctgacattttccatagcttcttcttatctttcctctcttaacttatatatcacctcctcagagaagtcttccctggccctctcttatctgaagtagaattctttcttactccttacatagcacactgctgactccttttcaccaccatgtatagctatttacattgtttattttcttgtttattttttctctctcctaccgagacataagctccatggggactggaaccttttttatccgtttgtgtgtgtgtgtgtgtgtgtgtgtgtgcatgtttgcgtgtgccaaagtttattgtggacaatctttgctcatagcagatgctcaataagtatttgttgaatgcagaaaggaaggaatgaagcaatgaggaactgaagcagaactgttcccaagctctcctacctgatttgatgtcatcttccaagtcattcttctttagctggctaaggactggtagaggggagagctggctgtagaacaaacaacctcccttgttagtgatagccaagtcattttcatgagcaccgtctcacctttccagaggaaaggctgcatatgtttctgtgacactcccactgaaagcagcaggcagcagggccaaagctcaagttatttttggtaagggtattggagaagtgccattccagcttcagctttggtgctttgtggtacttgatgaaaacacagcctcctttggtgaagcttgggagcccattacctgctctagagaagtgtagaagcctctggatttttgtacataatttcttgccctcaatagctaaagaagaataatgacaatgataaggatgataatgggctgaatgaaattcagagagcggggcaaaagttgtccatatgtttaagctggagtggatttctgttttgaatgtggtagacaatgactcttggattaatttctggctctgcaatgctatggttagaaggttctatttgaatgcattataagttttgtatcctatcaacaagatgaccacataagaaaagagtaccactatgtgtattgtcttttaaactcacgttcatttcattttaattaacacttttttttttttttgagacagagtctcgctctgtcgcccaggctggagtgcagtggcgctatctcggctcactgcaagctctgcctcccaggttcacgccattttcctcctcagcctcctgaatagctgggactacaggcgcccagcaccacgcccgctaattttttgcatttttagtagagatgggatttcaccgtgttagccaggatggtgtcgatctcctagtgatcgcccgcctaggcctcccaaagcgctgggattacaggcgtgagccaccgcgccggcctagtgcaagacttaaggaagcactcactctcagggtcatgccaatgaaggctcagcactcacgaagccctgacagcaagtgcctccttaaattttatgccctaggtgcctcacccccactaccctagtcccagccctggggagtgtgctctctacaagccaaataagataggctccaataaataaaacagaacgtaaaatggctcatgccacttgaaagtccaagaggtagttctagcttcaggcatggttctatctctagatctgtctctggttcttctttcttcactttattctcagccagtctctcattttggaggcaagatggtcagggctagctgaaagctgttaggagtagggccctcatgttttcatctgtttactgtagggaagactttgattggctcttctaggtcacatgctcatccctgtgccaatgccaggtgaggcacgcagaatgcccagccttgatcagctgtccagcctgtggtgagagtgactggggctgcactcagcactcacgccacgagaatcactcattgttgggactggtgtagcaattcccaaacaacagaggtggatcagttggctgcggttgcttttacttctgttggtccatagcgttatggaaatgccacagaaaattttggaattttctcaagtcatctgagccttacacatgtatctgtacccaatttagttgcgattctttgggcttcaagtcacagtatggtgccttaggctggactcctttagtggtaagtgacagaatatcttagtttgggctggtttaagcgaaaatgggaattttttagcttgtgcaattaaatagtctaggagtggcactggtgaggtagagcgtgctaatggacctgcccattatggattcattttgttctttcagtaacagaccatgcccagatgaaaacttcattctccattttcctgtggagccagctgtggccatgtgacaaaacactggtccacgcgatgcaagaaaaagagatgtttgacacatctggatcatatttttattagaaggttattttccctccatgttttcttcccacttcctgggaaatgagagggtgttgctttgttttcatgctactaataaagacatacctgagactggataatttataaaggaaagaggtttaatagactcacagttccacatgtctggggaggcctcacagtcatggcagaagacaaaggagaaactaagttatgtcttacatggcagcaggcaagagagcttgtgtaggggaactcctgcctttacaaaaccatcagatctcatgaaacttacttgctaccacaagaatagaatgggggaaaccactgccacgattcaattatctccaccttgccccacccttgacacgtggggattattataattcaaggtgagatttgggtagggacacagaaaaactgtatcagacaatgactagactcaaggatgaaaaaccgtgtcctgaggtgccagagttgaaccacaagcttggatccctgggcatccttataggactaagtgtcctacttgcccaggataaactgttacatgaaaaataaataaacttttatgcatcttaaatcattatattttggggtctaattgttacaaaatcttcaaatctacttaaataacttcctggggtgctggaagaggggttcaaatcagatcgtcgggatctggtttgcttctctttatgtcttggttctgctcctttagcgtggccttcactcttcgataagccctcccctggggtttcaccatttgtgccagcagctcctgggcctcttccatccagattccatttcagctggagtgtgagtcttcctcccagtattcagtaaaagtaacccaattcattattaattggccagcttaggtcatgtgcccatatctgaaccaatcaccaaccactagttgtccaaagaaaggccatggacagggctgcacacgtgagctggaaacaggggtgagtacactcagtgaaaatggtgactactatgggaagaacaaactctggatgctgaggaaacaaacagaaatgcatactacaaataagaagctctaaatattcaaaaattgagttcaaaacacggaacgaaatagtattttttcttgtcagacatttccagtaaaactaaatcatgtgtgatagtatatttgttcggcagcatatggttaggcaagttgtgcactgtagaactctataagcaccccttacattgcctacctctgtgaatggttcttttccatttctttttctttttttaatgttttttttttttttttttttttttgagacagagtttcgatcttgttgcccaggctgaagtgcaatggtgcaatcttggctcacctccacctcccaggttcaagtgattctcctgcttcagccttccaggtagctgggattacaggcacgcaccaccacacatagctaattttgtatttttggtagaaacggggtttctccatgttggtcaggctggtctcgaactcccaacctcaggtgatccacccacctcggcctcccaaaaaattacagggattacaggcgtaagccactgtgcccagtctctttgctcttgctgccagggcttgtattgcacaatttggacaagtgtaaatgtcctatgaatagtatatcacagtctgtacgttttgcatgtatgtcaattggatttcaccaaacaaaaccatatattggattcagtcttgcaatttaaaaaagaaatcatttgttccttcacgtctagtttgatattttctggtttgattctagtttcctcagctccagttaaattatctatggatgttgattatagtcagcattaactatcaagggatggatttctcgccttcagtttttgtcagtaattatttccgttattgtgggcccttcatttcaagctccttatgccttaatttcttcattttttgtttctataatactgtggacttggtctataaatgatgtgttagataaatgccttccatgaacacctctattttacagcaaccatgggcagcatttttttttttaagttccaatccttcaaaaggagctctccaaatgattttaccatttcatctcttttggtgagagatttaaaattaaaacatcattttccatagaatggcaacatgaagacagatggtttactatgtagcaaaaatagttctccctgccagaatatctcctttttgattgtccccatttagtctcggttctcctatgacacattcttggaggtttctgttctttaactgaaactcatcaagccaaggtgactaaaagctaatgttcccagtgagaatgggaagattcatatcgtcttagagttgaaagacctgtggatgtcatcaggtcaaacaatccactactaactgaatcctcttctcaatggctctgagcagtgatctctagctttagctttgtcgcttcccagtgagtaagaatttttgtctaatttctgatgattatctttgcctttgtgaatagtgcaaatgattagaaagatcttccttggaaatcaactagtaacctctctttctgtgagatcctctcttcagaagaggaataggagaatgtttaggagcagagctgggcactacacacacctcccttcaatcctagctctgatagtggccagctgtgagaccttagcaagtctgtaaaatgtggatgctggtgcctaattcattattcccttaacaagattagcacaatgcccagcacactggtgctcaatgtgtgttagcaattatcaatcaagtatgctttagggaggtaatgcagtcaggggcaggtgagtgtgaaattcagtccccttcttcatcttattgtataggcagtatctcataatggcaatgagagctctattgccaggctaaggaggcttaattaaatatgggcctggtgtatacattaacagggcacctacctcaaaaagtgcaggggagtttgaatgagtcaatccatgcaaaaggcttggagagtgcctggcacctaggtggccatcttgataaccacaaggatttactgagcacttgctctggggtcaggctttggggacagacagtgatgaggccaagtctcagccccctgggaaacacattccggcgggaaagaggctgaaacagggaaactgtggcaaatgataccagcgagggctaggtccctgacacaaggaaacccaaggaagcatttggcttaagcggtgacaatatccctctcctcagatgccaaggtcaaggcgagccgcggcaacaccatctccccagacacacacgcaaaatcggcccttctcggggaaagggcaggggctgaagggggaggcggggtgggcggcggctggaaaaaagtgaaatttcctctcctcctaaaataagtcattggagcgaggagagcgagcgctatctcagtaggctgtgggcgaggtgcgggggtggcgggggcacgctccgggtccgccaggaggggagggatcggaaggggaagcggggagggaaaggtgggtgggaggcgcggggagcgttccagggcggctgctcacgggtggccgcagcccagtgctgggactcgcgcggctcctcctcttagccccccaccccttcctcctctttcctcctcctccttcctcctcctcctcctccttcttctcctccttctcggccgggaggaggcagggctggatccctcagccgccgccgctcctcctcctggcaggccggccgcggagtcagctgacgccggcgctccagcctcgcctccccgcgccgcgctctgcgctccccgaaagtggctgcaagccggccgcccactgtcagggttggggggacagagaaagtgatgtgcgccttctaaagcctcgcccagcgccgccgaagcagcttcacctctccaactttctcccaccgactgcttgtcttgaccctgccctccaccctccccagagccacttcgggtgcgcgctcttgggtaaagggggggtcaccggctgtctgggatggcttccaattttaatgacatagtgaagcaagggtacgtgaggatccggagcagacgcctcggggtgagtatcgatcctctccgtgttgctgttcgccggttcgattgtctctctcttgagccagcatccctggagggtggacggagagtccccggccgcgcgccggagaattgcgcggtggctttctcagccgaaacccgcgtctccggggctgtcactgtaaggccagcgtctaggtatgtaatggatctatctttatctcttggatgacttggctttctgatggtggccgcgtgttgggcttcagtagcccctggagcccatctactcgaaataaatatttctcggtagccatggaagttggagctgagaagcccgggcgggggtgcctgccggatgcccccggttcccctcttttcccactcgccgccaacttaacttttccgggggatggatcggctggttgagaaagaggacacgcatactcggtgtgaacgaggtcacgaaccctctgaccccagggagagatttctgccaagcgtaaggtgtctttggatccccccacctctgtcccaggtgtcgtgtcaaaggcggtgcgggctggcctctggtcggggccaacttgggtagatacttgaatctggattttccgtggttcgaagccggggtggtggatttctgttgctggaatacaccctggaggtccacggaagggttatttacgtggaacctgatacctggcatagcgcaagtgctccctacatatgtcctgaaaggaagaatgaatgaatcttagggcacttgggacagatgttgacacaggctagctccttccttaaaactccctctctttcgcccctttctctcttggctcttcgctggaggaggcttcaaaagagaacctacccttcctctccttgggactgaatgatggtggaagaattcttgagggagagggaagatactggaacgatttttttatttcctaaaaatttcaaactaggtccctcatttctctttgcctcctatcaagtgttgtcgctgttttagttgatcctgtgcgtttggacataaggggtgaaaagtgggggtggagaggtggcgggggcggggggagaaaatatcctttggtgtaatgcctgaaataagtataatgtcagtaatcgtgtggaatgccgccattgataatgagtggtaaattgaatagctttctttagaaatatgtgtcatttggcatctttctcttacttggtctttggactgttttaatgtgccagatacttttactgaaaactgaaaagaaatttcacagtagtaaactcagctagggagggaagccctgtggggaggaacatccgcaattattataaaactcttgcctaattcgttttggtctttttcttttctttttctcccctgctggtgaccatgttttagcgattatgtcctgtgttattgtgaatatatacatatgtaattagggagaaatgtaacagaattcaccatttccatcagctctgccaaagtttccttggttttcttttctgctatgcaaatattctcatcttcaagagcacccattgttgggggtactttactgagtgactcccatgtaaggggcaaacaataatgggaactttctatttttggtatgcttataggctggccaagtgttacaattttaaggggagttaagttaaaaaaaaaaaaaacccagcattctaatttagctttactccatcatgtcaatggaaggaattggtatgagacatccattctgtgttagggagcattccaatgggaagaggacatgcattattaatgcacaaaatatgaattattcataaggatcagagtttatgccaaattgtgacacatggtaatttatttgaaaaactggttaccatcactttcttgtttgtggtaactgagattattttttctagattattacaattgacacaacatagccctatgtgtgtgccaacatttatggacagatatttgaagcagaaggaacagaaatatttagtttgtatttgttttatgttttacagcattttggatgctaatgagcagtatactttctcaagatttattctttttgtctgtgttcacgttcagacttcagaatatctattgaattatggttattgctcatggagagaaaaggtcaaaaatatgatcaagtaaatctggtcttatttgttagcattggttttctcaccagttaatttttaaaatattcttatggtatgatttacaaaagaggctgattacatagttgccagaacacagtgcaaaccaaagttttaatggaggctgcaaatattggtgaaggatgctgtacggaattggcatggggaccctatgtccacagtaaggaatgttagcggtattaatctaggctacatatagtctagaacagcatgcgacatgtatcttctaggaatatgtgccagtctcaaagagaggtagggcatttattttgtctagcacagagtagacacttggtaagttcatgttgaaatatgtgctgaactatatagtgcatggatggtcttgccatttataacctttaggaactaatacaacagcatttattaatggaatccagaccatgtttgggacggtttataattaaatacaaaaacatttcatggtaagcagctgttcctggtgccaaggaataaatgcttcttcagatttggagaaagaggagaagggaacgcattctgcttctattgcttgttgacctttgacctttcttggcctcagtttcctagtctgtacaatgaacactatttaatgttcttgggagcattaaagaagatatttgtgaaaatgcaatgaaagtctagaacattgattctgcttgtatcattttctttaatcaaagatgagttaggattggtagacggatataggaattatctatttccttctctttctatgtagaagtgtacaaaggcataaatgtttatgcagctccagattttttcaatggatgaaacttttacaaattatatacatatatgtgtatgtgtgtgtatttttatacataggaataaatatatacatacaacctatgtacatattgtataatatataatatacgtatatttatatatgtgattttttaacaggacaggaaacattctaaaaacattcccattcaaatgggtcacagataagtggtcaccttcatttgaaatcctaaagagtttaaatgattaagcaatcaaatatgtatagatttattctcttctttagacatcaaaaagcttaatgaaatataattcatttaactcaaaagtttcagtatcttcacatctgtattccccagcttaatccccattgtttcctggaggtctccagctgtgccctgggtactgaatttgttcaggaatgtcgacgttactatttgaggggctgggggaaggaggggagcagctgtccataattatttgagtaatcgattaaatgcactaaaaatttctttttaggggagaggcaaatcaggcaatttgtacaacattaacctgctgaatgtgtgacttagatagcatcatataacaattctcacttcgtttctttccttgcaatggagatgattttccaatcaatcattgtcatggcttgcccacagtgcaagtttcagaacggaaactcgggtttatttatctacgcacaatccctcagttacttgcctttaagtgacatttctgtgctcttgtctaccaaggacttagcagcttggacctcttttctgacctccactcatgtaaattctcctgtctatcccacatctccacttggatgactcacagacctgctgctcctagagtcctctccatcttagccactagaggtcccagcattttggttgcgaaggtaaaaatcacaagcgaaccttggtgtcatttcactcttctcccctcatctcccacccctacaggcaatccatcaggagatcttgtgggctgtatctttgaaatatatctagaatccggctgtcacctcacgctatccactgctacgaccctggtccgaaccctcctcatctcctccctgtaacattgcaacagtcttctcatttgacttcctgcctacactcttgctcccgctagtgccttctcaatacagtaaagtgttcctttggaaatgtaagaaaggtcatgtcacctggctgctgaagctgtcagaggcgtgtgaaccagagcaactccatcttgaataggagctgggtaaaacaagactgaaacctactgggctacattcccagacagttaaggcattctaagtcacaggatgagataggaggtcggcacaagatacaggtcataaagaccttgctgataaaacagtttacagtaaagaagccagccaaaacccaccaaaaccaagatggccatgagagtgacctctggttttcctcactgctacgtggcgctacccccaccagtgctatgacagtttacagatgccatggcaacgtcaggaagttacccttggtctgaaaaggggaggcatgaataatccatcccttgtttagcatatcatcaagaaataaccataaaaatgggcaaccagcagccctcggggctgctccgtctatggagtagccattctttatgcctttactttcctaataaacttgctttcactttacagacttgccctgaattctttgctgtgagagatccaagaaccctctcttggggtctggatgagaacccctgtctggtaacaaaaccattggtgactttccatatactgcagagaagtcttacaatgggccatgaggccctatgctgccccagaaccctctcgttcactgttttctctgcttggaatatgctgtttccccagttacctcctcctggcttgctctctcacctccttcagccttttctcagctcctaccctctcaatgaggcctttaaggcctccatctatctatctatctatctatcaatcatctatcatctatctatctatcatctatctatcatctatcatctatctatctatcatctatcatctatctatcatctatcatctatctatctatcatctatctatcatctatctatcatctgtctatcatctatctatcatctatctatctatcatctaccatctatctatctatcatctatctatctatcatgtatctatcatctatctatctatctatctatctatctatctatctatctatctatctatatttttttggcggagtcttgctcttttttccaggctggagtgtagtggcgtgatctcagctcactgcagcctctgcctcctgggttcaagcaattctcctgtctcagcctcctaagtagctgggattacaggcatgcaccaccatacccagctaatttttatatttttaatagagacagggtttcaccatgttggccaggctggtgtcgaactcctgaccttgagatccacaagcctcggcctcctaaaagtgctgggattacaggcgtgagccaccgtgcccggcctcagaccactctattttatttcttctccctctcctttccttctttccctgcccctttttctccctagacttattaccctctccttcatttatctttgtattgcctatgtactgccaaggacatgtgaagctacatgagggctgggacttgtttctctcttctttaatcatagctgtcccccagtgcctagtgcagggcccagcacagagtgggcatttgatgaagatttgtggaataaattaatgaccccatcactgtgttgtggcttaagagcataggctctgacatgtgactgcgttaaaatcccaactcactggctggttatgtgacttctggtgagttatttaatatttataagcctccatcttctgtaaaaatatggagactcttactactcacctaatagatgatgatcataaagagcttaacacagtgcttgacacagtaaaaacccaattaatgtttattagggctctcactcctacttccagtgtggttagagacaatgacacttaactggttattatttcactgtttctactgcaattgttcatatcctcaaagaacttgttttttagttaggaaaacaaacttagtacaagtaccaaatgttgcttggcattgatggttgatacagaaggaatttataagatttcgcctttataagattttttatgattctacacaaatggtagagatataaaataaggagaaatgcctcttcatgtaactccaattcgagtgaattcactggactaggaggtatttttgttaacttggggactgttttcttttgtggtagagaagaaattttaaaaattggtcagctcacggccaggttttaaaaataaacattttctaattctttcattttatagtttcacctgacctggtatgccacaaacgctttcatgtttcatttgaggattttagatttagatgttcaggaatccatgcattttttatggtaccatgacaaagtcataatcgtagtatgaaaattatacagatagaataaactcatatactccttttttttccttttgagatggagtctcgctctgctgcctaggctggagtgtcctggtgtgatctcggctcacttgcagcctccatctcctgggttcaatcaattctcctgcctcagcctcttgagtagctgggactacaggcacatgtcaccacagttggctaattttggtatttttagtagagacagggtttcaccatgttggccaggctggccttgtatgcctgacttctggtgatccacccgtttcagcctcccaaagtgctgggattacaggcgtgagccaccgtgcccggcctcatcatatgctattgttatttaagtatatgtatgcacatgcacatatatgcacatatgaactcatgcaactattcagtaagatatgtgaagtttagttactctttaagaacaagaggctttgggataactttaccagtagggaaatttatggccagatagactgcatatatatacatgcatcagctgggacgactcagttattttggcttcatttgaatcagcttcattgacatggtttccatgtcagaagggctttccagctggtatttcagtcgtcttcatctgattgtccatgtggatgagacgattaattgtgcataaagtcagcctttacatcatcatccccaaaactgatttaagcagagtggccaatttagtgactttgtatatagacataaaccaaattagtgatatgattgtccccacatctgccaatgtatttttgaaatcatatttattagaagactagaaatatttatttttaaagcagctttgtaatttttgtggggaatcgtttggtattttaagaacttagttttcattggaatatattttcttccatttgttttatcattcctcaaatatttcttgagtacctattagtgttaaccaccttaaataaggcagatacaatcaccatcctcaaggagttgacaatttaatttttgatttgtattattaacaagagattaatgtattcactatagttaaagaggaattaatctgagtaacaggtcaaatattgaagtgaaaagatgcctgaggatatttttctattctatttttgtgaaatgaggaagggcaaatttgatttttctcttactctaggaatttgatcctagtagggtggaaattaaacctttggagattctaagccttgaagagattatggtgcgacccccccgttcctgtgaaattcaaaataaaattgtgagtttagaaatgccacatgatatatgtgaatgtttaaattaaaatagcttctttctagaatgcagatggctacattttggataagtatttggaagctgatttttgcagagcagttgtgggggctgcctttatttcactagtgttctcaccctctgtttatgccctggatcccagagaacaaaattgttaactggttgtcttgtgttcttaagccgagttgttaactaggctccagtgagaggatgcaggtgacttttctgagacaatgctttgcagcttgtatgagattcttagagaagtctggtcctccctgccccagcctctcccactttccacctgctatgccttcttaaagattaagatcaggttgggtgtggtggctcacgtctgtaatcccagcactttgggaggccgaggcgggtggatcacccgaggtcaggagttctagaccagcctggccaacatggtgaaaccctgtctctactaaaaatacaaaaattagctgggcatggtggcaggtgcctgtaatcccagctactcagggggccgaggcaggagaatcccttgaacccaggaggtggaggttgcattgagccgagattgcgccactgcactccagcctggggaaaaagagcaagacttcatctcaaaaaaaaaaaagttaagatcaatatttcattattttaattgaagttttatttttagataattgttatgttcatatgtagttgtaagaaataatatggagagatattccatgccctttaaccactttccccccaatggtaacatctttcaaatttgtaggacaatataacaaccaatatattgacaatgatacaattaagatatagaacatttcatcccctggaggatccttcacagtcttcttatatagctgcccctcctgcccctgtcctccatatccctaatcccctgacaaccactaatctgttttccttttgtcattttgtcatttcaagaatattatgtaaatggagtccaggcttggtggcttgttcctgtcatcccaggactttgggaggccaaggcagaagggccacttgagcccagaagtttgagactagtctcaggcaacatagtgagactgtctctacaaaaaataaaaatagaaaattagccaggtgtggtggtacacgcctgtagtgctggttatttgagaggttgaagtgggatgatcacttgaccctgggaggttgaggctgcagtgaactctgatcatactactatacttcagcctgaacgacagagcaagatgagactctgtctcagaattttttaaaaagaatattatgtaggctgggcatgatggctcacgcctgtaatcccagcactttgggaggccgaggcgggcagatcacaaggtcgggagttggtgaccagcctgatcaacatggtgaaacactgtctctactaaaaatacaaaaattagtcgggcatggtggagagctactcaggaggctgaggcaggagaatcacttgaacccggatggcggaggttgcagtgagcggcggaggttgcagtgagcggcggaggttgcagtgagctgagatcgtgccattgcactccagcctgggtgacaagagtaagactccgtctcaaaaaaaaaaaaaaaaagaatgtaatgtaaaagaaccatacagtatgtaatgtttggggattggcttttttaaaactcaatataatcccctgagattcgttcaggttgttgtgtgtataagtttgttcttttttcttgctgagtagtgtaccatggtgtgtatgtacaataggtaccgtagtttgtttagacactcacctgtcgaaggacatgggttgtttctggtttttggctatcatgaatgaagctgatatactcatataagcatttgtgtagaggttttcacgtgaacatacgttttcgtgcctctaggcaaatgtccaggagtgcaattgctgggttgtagagtagttgtgtctagtttttaaagaaactgctgaaccgttttctcacagttgtaccattttacattcacattagcaatgtgtgagtgaatcggtttttctgcatctttgccagcatttggtgtcatcactgtgttttatcttagccattcttctagatgtgtcgtggtatcttattgtggttttaatttgcatttttgtaaagggtagcaatgttgagcatcttttcatgttcctgtttgccgtccatgtcagtaaaatgcctggattgcttattttttaacggttgagttttgaaagttcttcatatattctagatatcaatcccttttagataagtggtttgcaagtatcttctttcagtcttgtcttgtcagcctaatatcctgaagatgtttcaattttttttgtaagttttatagttttatcttttatatttaagtccatcacccattttgagtaatttttgtataaggtgtgcatttcaggtcaaggttatgcctatggatgtacagttactccagcacttttttgaaaaggttgtcttttcttcattgagcattttcatgtcttcgcctgggtcctctattctgttccattgttctatatgccttatatatgtacagtgatatgtctatatatgtctatatatgtctgtatttgtatatatagacatatatgtctatatatgtctgtatttgtaactatacaataagtcttgaaatagggcacactgatccctctcagtttattctttttcaaaattgttttagctattctagttcctttaccttttaatataaattttaaaataatgtctataactactagaaatctttctgggatactttctcattttacacacacacacatgcacacacacacacacacgatttaattggtgcattagtttatttttgtggtggaaatagcagaagtttgagactcacactttagtttgggtctcagcttggccgcttattggctctgtagccttagggaaaattgcttactctttctgatctttaccttacttatatatgaaaaatgaggataatatacgaaagatgaatataccaggctcttaatcctgtgcctgactcatagtagaaactcagtgagtcatactattgatttttattttttattggtaagaggttgaaatgatatttttagtttattgtctgtgagaaccatggccttggtggaaattaattcactcatattccagcggaagagtcatgtttttgataataaaaaaaaaggttgcattctatcttcctcttgctgttgtcttctatgatatatttttgtaatattgggtttatttaggagcctccagtgaaatcctatcttagaacataaagacttgaatatattagccaaaatggcagaactttgattataagactggccacagtatttttgcctattaactctaacagctttgtccaaatgtgagatttatatatctggagagataattttagggtagtaaacagcattcaatcataaaatgagaaaaagtattatttattgtccaacataactcaaagagttggtgactactaggtcttttcctagagaggaccatcctgacttaggtgcagagtgttcagctcacagcgtcatgtttcattgcactgattaactttatattatgttaaatttgacattttctctcaagtgatactggtttccaatttcagataagaatgtgtgcttcctctttaaataaagcttatttatttaaaaaagcaaagtaacttaattaatgttaacttacagtgcaggtattatatgaccatgcagtgacaaaaattttggaggtaggtggtggtacacagacgcagtgcaaatccaaagggtgcaggactgaagtgtgggaaactgcagaccagtgtacttattttttaaaataggttttctaaaatttctttacttatagccgccaaatgtcatcattttatataaataacttaaaaattaggtgcttagggaaaaaactcccatgtacccaataccatcctcttacaagactttcctctgatatcaccatgtatatgtcacttctcaccccccaaaaactgtacaaccttattttggttttgcccaagcccttattttttcttcccttcattcggatgtacaatggatactgctgtgattaacagaaagagaaactagcaagtctcgtcaatggactaactcttttatttaatacaagtttccatgtttagaagagcaattcaactcttagaattcattttattatcttaacaccatacattcattcaataaaagaaatttattttccaaacttttaagaaatcatacttctttgaatcccctagcaaaattgactctttatactaatttctcagtttccaggtttctgtctaccaaagtgcagatatgttggctaatctgtgtaagagccactttttgagtctgggttccattccaccaacagtggcctcaaatctggaagttatcacgaacgtagtctagtcttcagcatccattaattcagtgtggtgtaaagtgagattggatagcaacccttcccagagagtttgtcctcttggagaagtcttcactggtttgaatccatcttctccattaactggttgctcttaacgtctgattttctcctggctggctgtctcttggcatccatattccttcctcagaatgacttgccttgactacaacatttaagttgactcctcacatccttctagaacatcacgtaatttaaatccatgtatagaacttaacaatttttctttattttgtgccatttatttctcttctctttctgtttctctgtttctatatacatttttttcttgtttgtttttcttctgtaagagagggaatgaacaagatagccaagtccctggcctcatagaacttactctaagagacataagttttatcttacatatattatttgcttatgtatttttccttccctccttccttctttccttccttccctccctcccttccatatattatttgcttatgtgcttttcctccctccctccctctttccctacccctcccctccctcccctcgtccctccctcccttcctaccttccttccttccttccttttattattaaatatgtgcatgaagtaggtgttattttatgcccattttacaaattatttacatctgacagtaagttctctgaggccagggactttggctatcttgttcactgctgtatccccaggtcgtagtccttagtaaattctcaatatttgttgattgaatggatgaatggttttacttcctgtcagaagaatggaatggtgtattcagatgtaagaagacaaatagaaaactgtgcctatatcccatctcattttgcagtagattctcttctgaacagtagaacattttagaatttctcatagttgtttatatataatctgcaaattcatcatcaggaaatacagcagttaatatcaaaggtttggatttactccattaaaattaaattttatttgaattcttttggagtaggtaatatgtacccttggtacaaaattcgaggatacaaagtttatacaccaaagagtagagtttcctttcatctccatttcctagaatcatctcgttccctttttcagaagcaaccactgtgaatagtctcttccagaatagtctatatataagtagttttgtgtgtgtgtgggcttgtgtgcatgtgtgtgtctgtatgtgcgtttgcatgcaatttatacttatatagtcttctgagccatggatttcttatttagtgatatatcatagttttgaataattcgataggattcccctgtatggatatatcttatatattttatttgattatttatttattcttctttccttccttccttttttttgttaaatatgtgcataaagtaggtgttattttatgcccattttacaaattatgaaactgagatactaagaggttcagtttttggccagctcacacagccttatgtgtaagaacctgggttcgaatccaacgtctatctctttcatggaacattggggtaaatccattttttttcctctgttacaaacagtgctatagaccacccctcatcatacccattggagagcctgaaggtgaataaattcttagaagtgggacttattgttccaagggtattcacatgtagaatttcatgaaagttgctttggaggatgttctccagcagtggacaagaaagcccatttcctctcattttgtcacattaggcctgagagccttttcaacgttttgctagtctacgaggtgagaaatggactcatttgtgtatagatttccctaacttgtggctgagtttcaaggcattttataattagaatcttttcagttgtgcaggcttttttcttttaagagtaatatttactcaactcaaaaagtagttatttagtgagcatttacaaacatataaatcataatttactgtcttaaaacacaccttcctgggaaatggctcaatggaaatcttttacctaaaagataggataaattatatgttaactgttactgtattttttctctaaaaattaaattatgaatttgcacttttgataaatattatgttgaatgaaatgatacatatatacatatacatacgtatatacatacatatattttaaatttaatcagataaatacatattcattaatacagctcagtctatattcttggtcaatcttataaaatgcttcaagtgtgtctagccatgtggcaggagtgggagggtaggggatgatgtgaatctttgtactgagtgctagatataatttctgaatgttgcatttatgttgttcctgggtatctggtatcttgagcctcttttttcctttctctcttatttttattttttgagacggagtcttgctgtgtcaccaggctggagtgcagtggcacgatattggctcatggcaacctccgcctcccgtgttcaagcaattctcctgcctcagcctcccgagtaagtagctgggactacaggcgcatgccaccacgcccagctaatttttgtatttttagtagagatggggtttcaccatgttggccaagatggtctcgatctcttgaccttgtgatccgcccaccacggcctcccaaagtgctgggattacaggcgtgagccaccgcgcccagcctcttttcctttctctctaagctctggctatagcatctacttttcactcttcaaatggtgaactcttttccgtccatgtctttgccatctcacgcttccctttgtcagtaacgttcttccatggcaggctctgacttcattgtcaggtcaaaagtcccctgcccagggaactgtttgaccatccaatcttaggtggtctccttcaggtattctctgtctcactcctttttaattgcatgcagaatcatgcctcacaactgtaatgatttcttaaattattcatttctttgttgcttgtttcttctagtaaccacaagcactgagcgggtctttttctgttttgttcatggctgaattcttagtggctagaatagtatctgagcacacagtaggtgctcaataaatatttaagtgaataattgaaaacctgaaataacatcttgcatgttaaattatgaaagaggcaagtcaccctagcatagaatacatactcatattcatatatgtcaagaaattccaaaaggtttgtggaattctattgtgtgattcttgattcttgtagcctttttgcagtatcgcagctgcagtccccaggacaggccaaactggtagaagagaaacctggccagggtgagaagggcccaattttcacccctgtcctactgccggccatctgctatgagcagaccatgtcactgaactgcttacacctcggcttccgctgcggaagatggagacggaaatgcctgccctccttcccccaccagctgttcacctctgcacaggaagggtgactgtggttgtgaagagcatctcaagtacccgaaacattctattcagtcccaagtgggtctccgcagcatcccaccattggcttcctgagtggaaaatagctgagaaaacttgggatttttctccaaaattaccatgacttgtatcagatcccaaacaactgaatgtattctttactttggattccaagagtgatctcatattagaaaaagcagagtttaatttctggcaaagaatggcaaaaaatgaaagaaagagagaaaaagagagagaaagtgaaagaaagagaaaaagaaagaaagacaaagggagggaaagaaagaaaatggacccactctatctacaacaaaggatatcatatgtatatatgacatatatatcatatatataaattcatatgtcatatatataaattcttttaatttaaccagtattttatattacatatacatggtagagaaagaaaacaatgcaaaaaaggatagaatgaagagaaaaattttctccaaccccagactggtctcacttcctggggttagtcattcttagcagattcttgtatattagtacagagacgtttattagaggcaagcataaaagtgcgtgtacttgtgtgtatatatataatttgttttacacacatgggttcatattatacaatcctattatatactttgtcccttttaacgtatgttgaaacacttttcaaaaatttttatgaatggtcaatattcatttttttctatgtcacaatttctttaatgtagtccactaacaatggacatttttaggtagtttccaggttttgctatataaacaatgaggtagtgacatccttgggtatacactcacgcatacatgatactgtatttctaagataagtcctaaaaaaaagagttactcttacacagttgtgtacatttacacttttgaggaataaaacaaattttcttcaaagaggttgtaccaggtacactctggtaaagagtgcttgtaagagtgtggctttgtgtgtgtgtgtgtgtgtgtgtgtgtgtgtgtgtgttttaggatcagaggtaacagagagaacaactttttaaaggatgttcttggccaggtgcggtggctcacgcctgtaatcccaacactttgggaggccaaggggggtggatcacttgaggtcaggagttcaagatcagcctggctaacatagtgaaaccctgtctctactaaaaataaaaaaagttagccaggagtggtggcgggcgcctgtaatcccagttactcgaaaggctgaggcaggagaattgcttggccccaggaggcggaggttgcagtgagctgagactgagccactgcactccagcctgggcaacagagtgagactctgtccccctccaaaaaaaaaaaaaaaaaaaaaagggatgtgtttgtccctctgctccttggctcaatcccccactccccaaatctgttccctttatggcaaattgattacctaaaaattgaatctaattctatcctacctttcttacaactttcctgtgccttccccttgcacatgaatatctctgaaatgtactcaggacactgtgtgacccagagcctgctgcgttcactcgctgtgtcacaccatactacccaaaatcagtgcatgagcccaacacaccacctttagttcctccagtaggcacgcgctttcctttgtcaccatccttatatgtgctcttcctattgactagcaagttcttccccttactcttagtttctctaattactgctcatcttgaaaatccaggaaatctttttctgacatatcccagtctaaatggtaggggtagccacatgctacatgtggacatgtaaatttaattaaaattaaatataaacttaaaaacccaatccttagtcacactagccacattttaagtgataaatagccacgtacatagtcatcagtggctaccatattggacaacacagatatttttctaggctgaatgcggtggctcagtcctgtaatcccagcactttgggaggctgaggtgggaggattgcttgaggccaggagattgagacaaacctgggcaacataacgagaccctcgtctctacaaaaattaaaaaaactttgttgggtgtggtggctggcacctgtactcctaactactcaggaggctgaggtgggaggatcatttaggcccaggagttggaggctgcagtgagccatgatcatgccactgcactccagcctgggtgacagactgagaccaagtctcaaaataaaaattaaaaattaaatatttctataattgtagagaattctattggacagtgcttccctatattacttcttcataatactcatggctatttaaaaatacttgttttgagagtgttgttttgatgattttagcctcactagcctgtgagcttcacaagggcacagcttgtctcacttcttgctttttcccttatattaaatgttcaataactatctgttgaatgaatgatgagtgaatgaattaaagaattcctctcagctcttcgctttattgttgtactcttaatgttcagtggaccttctgggaaggagctggatgttctacacttttaccgatttccttcaaaactgcagttggataccttagcaagactcattcatctggggatatttagcctttcctattgggtttgacatttcagaatccattgcttaactgtgggaagattgactatgattgagctagacctgtgtggtgagcatggttttaatagtttgcttcccagatctccatccctgtcttaatgactgaagcattccttctaccagctgcttggagtgtgactcagtgacagcttgcagctgagctggtacttagttgggtgtggtggctggcacctttaggcaaggtagcttggcccatggttctcccttgattttacccaatgttctcaaaactaaaatagctcgttagtttaattttcataaaatggaaatttgatagatcatattttatttattatgttgttaaaatgccccactctcctcagtagattcatacactgaaaaaactctttgaagcccttgctgagagtacatcacagctgacctgtgcccgcccttgactccctccaaggtgctgatcctgagagccctccgcagtgaacaccctgcatgcagatctccttcttggaacctgttcctggaaaacccagtctccagcaacctgatatgtaactgcaaatctgcaactctagaccaaccttctaaagagggatttaagacctttttcaagaatctggcttgattttttggcccatggttctccctttattttactcaatgttctcaaaactaaaatggctctttaatttgattttcgtaaaatggaaatttggtagatcatattttatttactatgttgttaaaatgccccaatctcctcagtagattcatacactgaaaaaaaaataaaaaagaaaataccttaactggttcattacattgaatttgcactgggtaaagggttagtaccaactgtgtttttctctgggaggaagaagctccaaacagtaggcaagatttctgtgccttaaagaaatgttactttagcttttcttgcttcaatggcctaatagcagctcttcctgagtacctgtttatatcaccataaaaagggaatgctggttatagctcgttgtagccagagggaagagagatgcttttgtctgtgggattgattccactttaatcctgaacagggtatttggccatcaagtagcctactgactgaggggagaaaattttattttaattttttctcataactgtcaatttcattgggcagctatacatttctggggaatatttgtataatagatggaattatagaagttacgctcacaagcagatattttgagattgattaaagatttagaaagaagtggctgggcgcagtggctcacgcctgtaatcccagcactttgggaggccaaggtgggctgatcacctgaggtcaggagttcaagaccagcctggccaacgtagtgaaaccccatctctacaataattagccgggtatgatggtgggtgcctgtaattccagctacttgggaggctgaggtggaagaatggcttgaacccgggagtcggaggttgcagtgagccgagatcatgccattgcatttcagcctgggcaacagagtgagacgccatctcaaagaaaaaaaaaattagaaagaagtacatttcccaggcttctggggtacctctaagtgagactgacaattttacacataggactgcaaaagttctttatcatacagaagtaaatttctgaagttaaattcattttagagagacaggcacaggatcaagcgtgtgtgaaggagattggacgttttattggcattaaattttgaagcttagttttcagacacagatgaagttgaatattataaagatgaagaaaagaccttttgttagactaattgctctaatattaactcaagaatgggtcaactttctgcaagttaaggtcatgcattctagggaattcgatcttgattttaaataggtgtcatgaatacaaagttagaaataccagtttctccttttatcttacaaaggtgtaggctgagaaaggcactggcatattagctggagaaagactaacaggaagaatataagggttattaaaaatgtttcctactattctctgatctagagaggcatgcaagtgaagatcatattaaatttaagggagagcatattggatgaataacatcagttcaagttttgaaatccttgagaagaaaaaaagagctgagcacggtggctcatgcctgtaatcccagcactttgggaggccaaggcgggtggatcaggaggtcaggagatcgagaccatcctggccaacacggtgaaaccccgtctctactaaaaatacaaaaattagctgggcgtggtggcaggcgcctgtagtcccagctacttgggaggctgaggcaggagaatggcatgaacacgggaggtggagcttgcagtgagccgagatcgcaccactgcactccaggctgggcgacagagcaagactccgtctcaaaaaaaaaaaaaaaaaaaaagaaaaaaatgaaccagcataaatcgacatttagagtacagagagattcgatattaacttctccaattctgtactttacagatggggaaactgagggcaagtgagatttcatgatttctctaagattctggcctcttagtaaccacatttttaagctgtaaaacatataacctggtggctcagagcataaacctctgtgggaggcggtggacagacagatctttctataccatggctacattgtgattctggacacgttacttaacctctcctaatttctgtttcctcagttaaacaatatcaataattatggctcctgaatcacagggatgtcttgaacattaaataaaatagttgctgtagagccttttcataacccattagctactttgaaaagcagattctgaagttgcggaccatggctggttgttcacctggattcctgagccctggaacataatgggtccttaatgaatcaatgaatgaatattacaaacccgaatgtagagacactgcttcatgcattatgcaggctaaaattgtcatccatttaaaatgccaatttaaacagtcttacatttgaacaacatgcagctactttacttttggaatatctagttctgaactcttgtaattgaagtgtaaacttgtgtaacataagcataggtaacatcttctaaatggaggagtggaaggttaaaaggtggcataatctattataagattaaaaacatcatccactaatgagtttgaggttttcatgttttgctctattctatgttactccatttgctatatcttgtagaaaattgtcctgacatattgtggagtaggaggaaaaaagtgagtgtcagaaaaaaaggaattctggcacaaatgtgtccacatatatatttctgcatgcttgtaggaaaatgaagaaaggaaagacttctaatagtaactatgataaaggaactgtgttttccttgaagtgggtggaagtgagttgagtggtcatttgcttttgtatttttgtgcttttgtatttatttatctgcttatctagtaatctatattatttattcatttatacagtgtacattcttaccttttgtaatacaatgaaaacaatattatgaccctaattgaccagagacaaggaacagtggttggaaggtgatttcttttagtgaatctatttaagttaaaatattttgaaaatcccttctctatgtcgtaagggtacatactcagatattgtattgtgttgtcttaaaagacatcatccagtaacatcactaaatttttctcttatgtatcttttgggaccttggagagcaacagatcatgttcatccatatgtaaattaatccatttgtcactttcactgtatattttgtgttgcaggagaattagtgaggcggtgttactttctgcaccttagcataattattgtgtcattgtcagagacagtgtaaatcttgacatttacaatggaatatattttcctttagtgaccattactaatgttgttttaattaaaagcactgatagctcagggttttcagcaacatctctcccattgtcataaattagaggattaaattgtcttatttcatatcctactatgtttaccaagggaacaatagcaattctagtttgtcaaaggagagaaagatgggatttggattaatctgctcatatatttaagaattgcagcttgggtcagtgagagactgtggtcagattgagcaattgggaagaggaagttgggtcatgttttcagagtaaatcaagctgatttggaaataaaatgtaccttgataatttgtttacttttaatttttgtcacactgcaagtgttggtgtttgctgttacgtagcaaaattacattcaatatttaagggccacgatcctggtgaactgtataaagagtatgttttgtttaggacaataatagaaagtggggaaggagaaaatcatgttctattgagcttattttattcacaagctagtatttttgcagattttcactctttagccaaaaaagactttttttctcccctgtggaagaataaagccatctaactgtcatttaagggcagtcacttgtaatgcaaatatagaaatatggaaatattgacagatatgagctatatgcatcagcattctgagtttgaaattaataataatgggacactgactaatagctggttctgtacagcactatatgcttgtacagggtaaacagttactaccggtgaccccaatttcatggatgaagaagttggggatcagagcactgtcaaagcttgtcctaggccacatggtcaagagagatgaacctagaatttgaacttgggaatgtttaattaattcttaatttaactcttgggataaggtttaaacattgctgttactcccttgggagagagaggaggattcttacatgccatgctagattttctgtattcatcctttttaattctcttttcactaatcctttaaggcatgtgttattaacttcatttaagttttcaggaaactcaggctccaagaatttggaagttgtccagagttacagacagggtaaaggattggatagagtttgaatttgtatttgtggtaccggtgtccatgctagttctgttacctatacctaccctgatacagacagacctagaagtctcatcagaatgctggatggatgaggaagtgtgggtgaatcaggcatcacccacaaagactgcgtctgtgaatgttctgctaatatggcagttattgtactgctatgcagccaataatagtggaattattactgagtgggaggctctgtgtttcacttatgttgtctctatggccaatttaaaaacatctctgtgtacattagtaaggttaagacacagattaatcaatcacatttacacaaacaagatgctcacatccaccgtttatggttaatcacattacttgaccaagtagcaatacagcataatggttaaatctgggattcaatggaatctcagtctattctgacgtgttgtcactgaactcattttacaggtaaagaagtttgggcttggagggatgcacaattcactgaagattgctcacctcggaacaggaggagcgaggggctcagatccatgccttctctgcttaatctctgctatattgatgcatagtcctgtagccaatccttgtaattttaatattagtaacagggctaggtgaataccccaggttaccacttgaagattgtctcttttagatatgttctcaaactgctttatttacctgatcctctgcaaatgaggagaaacttcaagaagttgctaaatgaaaaagttaaaaagtggattttaaggaaactaaagtgaatgccatacaactgacttgaaaaaacaaaggaagaagatgcagcaggggtttgagcactctttgtgggtttatttctttaggaaaaaagactaaagctaaattccatagttagaatctttagaagaatcttaataaccaagatcatcaccaatataataaactaaatttgaacactggacacgaaaaaaatagggaaggccacatagatgtcaataaacatttttcttctttttattgtcattgttttgctgaattttataatattttccttttaataacctaatatgaacctactgccccaatacaaaattatcattttggtatatttcttcctatttttttctcctaaacattgaaagtttcacatggttacaaggatcacatatttacaatgtcatacccagtgtatttttttttttttttttttttgagatggagtttcactcttgttgcccgggctggagtatagtggcacgatctcggctcaccacaacctctacctcccggattcaagcgattctcctgcctcagcctcctgagtagctgggattacgggcatgtgccaccatgcccggctaattttgtatttttagtagtaatggggtttctccatgttggtcaggctggtctcgaactcccaacctcaggtgattcgcctgtctcagcctcccaaagtgctgggattacaggcgtgagccaaccgcacccggccgtgtatatttttaaatgtattttgttatgttgtaaatacttccccaaatcatcattttaactttaaaactgtgagtttgaagtctatgatgactaggtacgtagtttacttgatagtaaaaacatttaagttgtttttaactaaaagtgacactcaggcttgtaactttgaccatgttttagattgtttccttggaatggatgtgataatgaagttagagagtttgaatatttttatggctcttaatacatattacaaattaacttccctatgggctacgatttacattacagccagtttttaaggctagaaatctggcagtggggctgggcgcggtggctcacgcctgtaatcccagcactttgggaggccaaggcgggtggatcaggaggtcaggagatcgagactatcctggctaacacgatgaaaccccatctctactaaaaatacaaaaaattagctgggcgtggtggtgggcgcctgtagacccagctactcaggaggttgaggcaggagaatggcatgaacccgggaggcggagcttgcagtgagccgagattgcggcactgcactctagcctgggtgacagagcgagactcactctcaaaaaaaaaaaaaaaaaaaaaaaaaagaagaaaaggaaaaagaaaaaataaatctggcagtgggccacagaggtagctgatgttctatttgttttgcagtcatccatgcactggttataggatgtggctcagaatcccaaactaagtaataaaacaaagtcatatgtagagtccaatgtgtatatttcgacccttagcatgaagatacatacagtgttttgtgacttccataatttagagtctctgtaaattctttaactcatttaggtatttcattgtaaccaaagaaaacttaaatatgacttagcaatggtgagctgtgctgtgttcagcacattaataaatgccaccaaatgatttcaatgaacatttttagttcatttgttctgaaactagaaagaagacacttaatattggtttctgacttttgagcaaattttatttcctcggttaatactctgaatgtaatttacttgctatgcttgctaacaatggaaagcattgaatttggttttgtggcttatgctctttatcaattatatgccattgataaagttgtctacctccactgcaatactgggaaggttaataaagagagagcgtgctcatttgagtcagttctgtactgacagaacgtgcatctctggctatttgtggtatgtatatggcctatcagaaactacaataataattgagaccaatttaataaccattataccagtgacctagtcattcttgtagtttggtatatttaatgcatttacattcatttgtggatccatgtagaccacacattcattcatctattcaacgacttttcattgagtatcttctatgtataaggtaattctttgtaccaggagataactggtgaatcagagtaaaccagaaaatagatgaatggttagtatcgttgctctgctatgcactcatttaatgagtcattttaggattactatagcaacactattaaaaattttacagtcattcacatggctcgaaattcaagaattaaaagttcaaaagggtatacaggaaagattctctcacccgtctacccagagccaccaattctcctcaagagggcaatcaattttatagtttcttctctttcagccatatttcaagcatatatcagcatatacatatataggtatatttgtatatatgtcatgtgtgtgtacaccgcattttttccccacaaaaatagtatatatgcgctatccattattctctaactaccttgtgtcacttaataaatttcaaaaagctcttttaattattacttaaagattggccacatttcttttttattcctgtcagcatggtatttcattgtgttagatattctattaattttgaattcttgttgattatattttatcattattataaatagtactacaatgcatatctttacataagttgctttcacttagatttttttccttaataactagaattgcaaattaaagtggagcaagtttctatggctattgaaaaatattcttcaagttataatctggaaatattgatctacagtatgcacagaatactatgttttgtgtaagaagtgggggtaagactgtatatttgtatttgtatatatgtgcttgtgtttgcacaaggaaataatgcatttagttgtaagtcagtgactgggtctggtgcaggggtaggaaatagaggtggaaagcaggctaattaatatatacctctgaaataattttgaattttgatccatgtgaatgtattactttttcaaaaaattaatattaactataaaattaaaaatcaaagtatatttctttattattctgccattttcaatatatgagtacacatggatttttttaaaaaataattttatagactggggtattggaaaagtagtataatcaggtggaatgcaggaagtcacaaagtggacctggccttggaacgtgttcattggttggatctaattcatagttttgttgcttttattcttgattttttttaaaaaaatggaaaagtaatgaagtgtttcccaaatgtcatttattcatcctcttcacagtctttgtcatatgtgtgaatagttttcactgttattcacttactacttcactaaaataatttatttttcttttttttggatttttatagcagtgccattaacaaaaagccaatattattttccatgagtagaagctgcataaattggagctccttcagagaagaagaaccacaggaagatatttaattagaggtttggtttggggattttggggattatttcttttgcacttgtaggaacctggtttgcagggtctaggtgctcctagtgctgaaacctgacatcagaagtgaagatggacataaaatgaggtgattgaagacaaactgcagcctatgaagatgggctagaagcatctgattttcaaagcccccaatccaccaacttcaaagatggggtcatcttgtaaggagaagagctaagcaggtgcttggccgaggtttctgaggagctgaaggaggatctggaagcagttaaagtagttgcagcccagctgttgtccatgccaccctggtgaaccagcacatcagagacagtgcgcatgagtgagagtagtgtgcactgccctgagcttccagcggggaagctcaccttcaccttcccacatcctacaatatggctaactttgtccaccttccagatctggctaccctcaatatggctaccctaaccttcccacatcctacaataaggctacctttgtccaccttctagatctcgcggtccaccctaattctgacctgtgcaaggaaagcaattctttgaaaaatagttctagtttaactgagctgatataatacaaatccactgcaaaagataactaaaaataaatacaatgaaaatgaagcaatattagacacattgttcaatgaaggcactgagcctgaggctttctcttgttgaaaagcaagatctggaagttttagggggggtttaaaattattgttacccactgaatggaacttctccttgactcactcagaaggactgacatgaaaaatgagtatctttctcaacgtgaggttctgtgccatttgttgcctctcccaatacagtttcttcttctctctcagttgaaggaggatacaggggtgattggagatggtgtcatgctatccttggccttatctgcatttctgcttcttaaacgaatgaaatgatgaactagatgatcatatggtagacagaagggaaaagagtgattttatttatctgtagacagagctctttgaagacctgtcatgggcacacatcaaagacaaatgttgtgtgcatcaaaggcttgttggcttttgaggtggtaggtgagaaaaaagcatagtttggctcatatctgtgaaaggtgttttggccatctcagtacccattggagaattttgtgtagctaaagagacctcatgactttgagtttctggcagacctactaactgtggatggaagcaccaggggctggcttctcactgagatgcttctattcatatctgtcccggtggcattccccaagtggtgtctcctggatcccctccatccttgaatctgtgcctcatcccacaccccactgctcaggtttgaattggttctgcagtttaccagtggtttgaccttggggaagtcacttcaagtccctgcaatgtagggatattataggctccaaatcactgggtagttgtgaggattaaatcaggggttggtaaattatgatccaaaggccaaaatgcccctctctcctgcttgtttttgcaaataaactttcacgggaacacagccatacccattagtttacatgtaatctgtggctgtttgcacacctcgcagcagcaagttgagcagttgtggcagagaccctgtggctcacaaagcctaaggtatttactgaaaaagttagctgacccctggattaaacaagtgaatacctataaattcaattcccaaatgtttatgggctgctatattgaggtattgagcctataagagtgaagaaacacagacaaaagtccctgccctcatggagcttacagttcaaggagggaaacagataataaagcaaaaagaaaacccccaaaatgtaaaatatatgtaaagtgatttagtggtatggagggggaaatgcaggaaataaagagaaagagagagaaagagagagtatagggggtgggagatgcaattttaattagggtcattagggaaccttcactgaaagagtaacatgacatcagagccatgtggacacatgaagaagagggttccaggcagaaggaacagccagcataaaaggacaagagccttgaggtgagagtgtgtgtctgagtgttcagagaccaacagggaggccagtgtactcaaagcccgctgggtggtggagaggagagacctgaagatgctttcagtgagctgggacttccttggccacagacaggatgttgcattttgttcttcatgggaaggaaggcactactggcttgtgagctggggatagtgtgctttggattgcattttaaaaacatcactctggctgcagatggcggccatgagtggcagcttgaactggggttagagctgtagaggtggtgagaagcagcccagctctgcctatattataaaaacagagagttgagaattccctgacagatttggagtgcatcaggaaagaaagagagaagtcaggaagactttgatactttgacttggtcaactgcaggaatgggattaccattaactgcaatgtggaagaaacagagatagggcaagttttggggtcaaggttaagagtcagaatcaaagatgttaattttgagctgccccttagacatcggggtgggattgtttagaacaatgtctgccatgtagtaaattttcaatacatgttggctgtaccatgattggcattattactgaaggcttactcaatacatgccattttatttctttaaattttattttaatgtattttattgagacagggtctttctctgtcacccaggctggagttcagtggcactatcatggctcaccgcagcctccacctcctgggttctagcgatctcccacgtcagcctcccaggtagctgggactacaggtaggtgccaccacgcctggctaatttttacaaacttcttgtagaggcggagtctctccggttgcccaggctggtcttgaactcctgggctcaagtgatcctccctccttggcctctcaaagtgctgggattagaggtatcagccactgctcctggcttgataaatatttttgaatacctgctatgtggcagcactgtagaaacaatgactgagttctggtttctgtcttcatggggagatagagaaacacctggcgatcatacgcgaggtcactgctctgaagcagtgcagctttcggggaatcacagactctgcctgggtcctaaacatgatttctttgaagttagccatttacagtttatttaatctatctatatccttgtcctcatctataaaataggaacatcaactttatttggataatgcatctaagtgctcagtaaacaccagctgttagtataacataaaggattctataaaatcagtcatttgtttcacaaatattttttgagtacttattaccacgttacaggagtttggaaagtacttgggatacagtatgaacaagaacaccctgcctttaaggagatcaagggggactgagtggggataaataaatgaaaatgataggtcgaggtaataactacatagaaaataaaaatatatatgttctacagcagcactgtccaatggagacataattagaggccacatgtgagccacatgtacaatttaacatttcctagaagccacattaaaaaataaagtgaaataggtgaaattaactttaatgctatattttatttaatcaaatatatccaagacattatcatcttaacccataaaaatataaaaattattaatcaaacattctacattatcttttctactaaggcatcaaaaatccggtattttacgccctgtggcacaattcttttcagcctagccacatttcaagtgcttgaaagctacatgttgctgatggtggttgtcacattgcacagtgcaggtgttgaatgatgaggtgtctgctttagactgaatggtcaggggaagatgagatcttatgacaggaaggacccagccatgagaaatttgaaggaagccctcatgggtacaagatagaactaggcaaagaacctagggcaggaatgggcttcttatgataattaaaagcagatcaacaaagccactggggccacaccctagagaagaaaaaggatagtcatatcacaatggagaattatttggggccagttctggtaggagtttaaagagttcatgatgaggagagtggatgcattctaagtgtattgagaacccgtggaggatttaagaagggaagtgatatgattaagctatcactgactgctatgcagagagtagaatgttaacagcaagcatgtaagcacaaagccatgagaaatacatccagtctagctttagaagctcgaagatggcttggaggaaatgtgtcctaaagaggacttacccatgccaaagttgggtttagacggggttttcagagtcagggggtgttttagacccatagacttcaaacttttctgattatacaatgcatgcaattaaaagtagaactcccagtatttgtataggtgtttatttcctatacatgtgcactgctatcaaaccatgtattgcagtgttattattttactacaatttttcttatttatcccacctccccaccacacataaataaaagtttcattatttttttcttttatcccactgcattttactttggaaatgactgttccaggcagacagaattgcacaggcaaagggctggggatataatgatgcttgtcacacatacgagatggcaggagcttatatctggagggtggaaataaggaagtgggtaaggtgatggtgagggagtgttgagaactgtgcaggggctacctcatgaggagcttgcaggctttgggaatgttttaatttttatatttatttatttatttattttgacacagagtttcgctctttgttgcccaggctggagtgcaatggcgcgatcttggctcactgcaaccagtgcctactgggttcaagtgattctcctgtctcagcctcccaagtagctgggattacaggcatgtgccatcacacctggctgattttgtatttttagtagagacggggtttctccatgttggccaggctggtcttgaactcctgacctcaggtgatctgcaccccttggcctcccagagtgttgggattacaggtgtgagccactgtgcccagctatttatttatttttttagacagagtctcgctgtctcacccaggcttaagtgcagtgacacgatctcggctcactgcaacctccgtctccctggttcatgcgattctcctgtttcagcctcccaagtagctgggattacaggcacacgccaccccacccagctagtttttgtattttggtagagacagggttttgccatgttggccaggccggtcttgaactcccgacctcaagtgatccacttgccttggcctcccaaagtgctgggattacaggtgtgagccaccgcacccggcctaatttttaattttaattttaatttttatgttttgagctggagtcttgtgctgtcacccagcaagggtacagtagtgcagtcatggctcactgtagccttaaactgctgggctccagcgattttcccatctcagcctccccagtagatgggactacagtcgtgcaccactgcacctggttaattttacaatttttttgtagagacaggggtcttgcttttttggcccaggttggtcttgaacaccttgcctcaagcaatcctctcacctccgcctcccaaaatgctgggattatagatctaagccactatgcccagttgggaaagattttaatatattttcatatatgatgggaggccattgctgggttttaagcaagagatggtgtctagtattttggtaagcattttacattcattttctcatcttatttatctttaacatctgcaaagcaggaacaaatgaaagggtttcaagcaagatagtgatgagagcatttattattgagtagaattttctcctttctctcctctccacttctctaattaaattctgtaagttaaaactcatgctggtaaagaccaagctttaatcacagagagaaatttcattctaggacagactgcttgcctgctcacactgacccctgcctccacctgtcccgaaaactaatgctgcctgggagctagtcgactaaaaaccacccagttacactgcgatctggaaatgtccattggaggctttcagacggcagtacatatgcttttaaaaatactggggtggggggatggggggagggagagcattagggaaaatagctcatacatgctgggcttactacctaggtgatgggttgatgggtgtagcaaaccaccatggcacacgcttacctatgtaacaaacctgcacatcctgcacatgtaccgcagaactaaaaataagaattaaaaaaataccgacttacatttttttgtttgcattctttattcatatgggaaatctgctgctataataaacaaagctattcatttttcttactgtaggttctcctttctcccttccttggttaagcaaactcaccctagaaggggctgtttatccacaaatcctcagtaattaagagtcacacttgacacttaattttaaaatatatgtacactaaatagcataacattttaaaaacagctgattttaatctttgtacttgtacagtttttagctttttattagatttaaagagagaagaaaaccattttatgttaaatttttagtcactgttaagagaggtgttttattgccaatctctttaaaccacagccaggcatgtatactcagaaaattactttacataataatgactaactggaaaaactgataatattattgaaacattgagagaaatgttgtggggggttttaaaataaattcaacataggatcccatggcctagttttggaaagaacaactctccttcccgctctactggaatgcagttggcccagcccccgctgccttgcttgagttcccttacattgccctgggttgtgttggcttggaaggctgcctggccttgtgtgcttgctgggctgaaattactctccctgctcggctattgggagcacaccccatctacaaatttgtccacttgatttcactcctgcgcctctggagttgaaagagtagctcattaaaatgggaatgagccagagggctccgcagggctggtttgatcaacactgtccgtggtgctcagcaggacaacacagagtagcatttgcatctgaggacagtcaaacccacatcaccaggcttcaaccacaactgcagtaatagctaccatttattattttctacgggctcaatgctgagctaaacactttcatgtgcttttattaagctttaccttgacttcatgagctaggtagcatcactttggagaatgagggtgctttaagtcacacacttccacttccagggtatcaatgctgcattgaccacttcctagctttgtgactttgggcaagtggactaactcctggatgctcacatttacccatctttaaaatggggatatactacatagagctgttgtatcaagcaggataccatagtgcctgatacatagtaggtgctcaataaaagttattgacattgctttgctaataggtacttaggtttaggaaggtgaagtcacctgcttaacttcctcatgctcataaaacagatattttctctggccttaccaaaagatgaaccaaagaaagtaaagtagaaaaggtggtagatagctgataattttttaaaatgtgtttctagtatgctagtttgttatacatagtttcttggagaatttaaaagccgttggcttaatgttcattcactgtcaactaacactaggtaaacattcatagctgcaatttatattggtgatggtgcaaatggcagaaaattcgatccaaactaagcaaagaggaaggtattggcttatcagattcaaaggcccagggatgcacctgacttgaggaatggctcattgctggagtcagtgacattgatgggacctgattctctcttggcttttctttccttcattctcatacagtctcttcttggggttgcaagatgactgcagcagttttaaaactcatatcctttcagattctttcccaatgagggagagaatgtacttctttttcctaacttttgaagaagcatttttaagcctggccttcattggccaaaattaggtcccatgtccaccattgaatgaatcttgtggcttagatgatggggtaggaggattgggtcaggccattcagtttgctctctgttgaacctgtggctgtgtctaccttatacacaccaacagagcagaggtggcttcaccaaggaaatgtggagtgctgtttacctgtgtgaaagaacagatgccccatgacacaagcagtagaaatccactagactactgaatacataatgagtagactcacctatgaatgtggagacatctgcttcctttcttttcctatttcctgaaagttttctttctgcaaaatatacctattcagagaataaagaaaaaataaagaattatccttctcaagggaaaagagccatccataatgcagtcttttagattttctgctggtcccataaatattgcaatacattgtttatactcagaccatcatgtcatttatgatgattagcaggaactcaaaaggcattgactgacctggacagttacaatttgttaaaaatatgcattgtgatttttttctcatattgggggtcaacttaagaagttgactttgtcatttatacacagtttatttatccatggtaacagcagcctacagtgggcctaattataggcccactaattatttgcctttgggacagtgagggtgataaaacatgggttttgataagaaagtttggcatttttagtagtattcttttatgttaaaatgttgtactttgctttactcttatgaaaacactttttgttaaaaaaagaaatttgctatgaaggataaactccatttcaatggtgtatattagtcttcggcctcagtcactacatagctgctgtaatgtggttctggggaagcccatcaccagagcacgtggcagctgggagtggaagaagggtgcaaagagtaaaggaagcagagaggagcaagagcaaacatttgtgggggcctaagcatgtttcagaaatgttgcgtcaactcttatttcctcataacaaactcatgatgtaggtttgttttgtagacactgctgggcatctcactgatggctttttcccccttatacaccagcagatcctcgggttgtttggggtcatgtgatacccagctaaaataactacatttcccagctcctcagctcatgctcagtcatctgatagggcttctggtgaagccctttaataaggggcagaatatgttggcaacttgtcttttgcctcttcctagagtgtacccagggatgctcctggagattgagcagtcatcttggaactatgggctaataagacatagtaattagttttctgttacattcagctgaatgcaattcctaattagaaaaacattgttcatagtagttaattgagctttttagtgagaattaagcagtcactttttatattcagcctgggacccagcttcaccagtttttccaatttttaaaaacaaaattggaaatcagcttttacgtaaaattttgtcttaaaatattggtttgttttgtttgcttgtttgctttaaatactctgagcaaaaaaaaaaaaaaaaaaaaaaaaaacccaacatccatttgtaggccaccattttgccaccactggtcatttattgctttcatttattcacttaacaaaccatggagatgttgaaagtaattcagaagtgtgtcactaaaggactagagaataagactgtcaaaggaagatttttaaaacgtgagattattaaagttgaagaagagtgggctgtgcattggctaattaatagttttcaaatatatgaagggattttagacagctgatgttgactatcctttgtcttctgcagaatagggtaaaaaagaaaacacaattatttttcaggagaagaattttgaataaatgaataaatacgagaacagttttctaggtgctgagaattattaaattttagcagaggaaggggctgtgggcctttattttgtaaagtttttttgaattaggacagattatcagagagaaatttgtgtggttttggtgaccttggaattacctcccatctggaattttgagattcagattacttattctgaagggattcaatagctgcaccctactttttgtactcattgtgcactgcaggatgcaattcaagggaatagctgggaagtccgaagtggttttggattctgatttcttgacaaagtcgttggtacctcctaagccatcactgctccagttaagggacatgtggctctgaatacagggctccttttggagtctcccctgggatgtcacatcttctggtttgacagatgccaacttgacatttttctcctctttcattattctgaataattctgcaaagccctcatcctcccagcactatatgtactaagcgtgagaatttgccttttccacttgtcaaaatatgttaagagtttgtaggagtccaaggtcatgcttcagttttcagacagaagaggaattccaagaattccagaaatggcaggagatctcttttcttgctaactttggttcaggtgtgctttaaaaattcaacatttaatgggctgttaaatattccttcctcttgctgaggaacttcaagttattttaatatatattgagggttgcctagtaactacagctttactagcttactgagagaagttttactctttttttttttttttttttttggctacagaaaggcaatcaggggagagcaattggagatggcttcatggagaaaaggaggaggaatatggtgtctctttgggacttgaggtcatgtaaaactgatgttagaagaaacatgtaggtccctgtctgaggcaattagaagcaagttcaaggaaatcatcttccacttaatctttgcttatgctgaatagtttgagtgaatgatgtcacagggagttgaattaccaaaatgctcacctgccttcccccatttctccctcccttcctccttccatccttctttccgtccctcccttcttctcttcttccttccttcatttctttctttttctttttttaaagaaaataaataatcttactgttctaaggacctaacttcaggctctgagatatgtattagttataattttttttttaaggtgaaatttcactcttgttgcccaggctggagtgcaatggtgcgatcttgactcactgtaatctccgcctcccaggttcaagcaattctcctgccttagcctcccgagtagctgggattacaggcgcccgccaccacacccagctaaattttcctatttttagtagatacgggggtttcactatgttggccaggctggtcttgaattcctgacctcaggccatccaacccgcctcggcctcccaaagtgctggattacaggcatgagccaccgtgcccggccagttatgactgattttataactgaattatttctcttcttaattctgcttcttataacctagtgggaaacaaccaatgaacaagatgaaaatctaattgaaaccaccatttattttcctgagtcagtccaggtttgtaactaatttgtagattatctcaatgttgaactttgctgagttttgtgaggacatggagattttataagccaaggacgtagatatctctgggaggacattttcttgtctaccacagtacatcttgttgctattcattactaaatccttactttgagatcttaaaacagggaacatcctaccaatgtcagttcagatgcaaatttgtttgagcttgtgttctctcttgattaatacatttcagagagttaatttgtttaccaagaagaaaatcatttttttgtattggttaccaatgaaaagtggcatagtccaactaaagagagtacgcaaagatgggttttgtacctcctggggagatgctagctacccagaaacgtagactaataataaataagattactggccatcagccggttttgccaggtgatggcatgaatgttcaacgtatgcttttatgcaattctgtgatgctgcagtaattggggaaggcattagctgacagcagtccctgattcgatccatctctttctggctctggttacttctgactcataaagtggacagggaaagcaaaaggagaaatgtgtataatagtaaaatgttcacttgcagtgtgtcgtgtacccttaggctaaagatagacaagcatctcagaatctgggtcccatattctcatttccccgtatataattcctcaagtgggcagaagtgtatctggttatataatccagttatagtgggaagagaaactatgtttaaatatgcatagggagaaatcattgtcagctacagatacatatttaattacagtaagaaaaaaatatgaatttgaaaatgatgtgggggttgttttattcaaattggggttctaattcagtctaaaaaaaactgagcagtgttgttgaaatgattgcctcttagcagatagtatgtgtatatgtattctgtagctctgcctgacttaaagaggcttttacaacagatggaaaggcatagtgagagaagaaaataatttaaatttaaccctttgtaaatactctagctttaagggcattttgccttccttgggttgtgggtagagtatgctatcatatctgaactgtgtgttccccttataacatcctgtgctaagtgctcatgctccccaaaattcaggtccctctaaatgatggtgatgggaatccaactctgacagtttgaccccagatgtgtgctttacactgacccaagatatagcctagcaatatacgatgtaaaaattaacattaactcattgactcaactactaaataggtactaaaagtcaagctttttgctagacctgagaatatagaagttgaatttagctcttgccctcaaagaatttacagtctagggggtagacctgctcctaaactagcaattaagtctttaatatctatgcatttattctgcaacactgaatttaaaacaggtttttctcagaagcaattttgtttctacaaactgtctcctgggctcagagtccctcgtgttaccgagttccttgaaagccatgcttattgcttttaaatgcaacatatctcgggttgatgtttttgttctatagtaatcctttcattcccttttttatttgagagtttgaaaataatgttgtgtgcaaaatccctaaggaattagcagagctgatttgattcaaatataacttcccaccctgtgtgcagtgtcatgcccctgagtttcatatacatgagttctaaccccttcttgtctcttgccaagatttatcagcaattggttaacctatttgggttagcttagcttcattttcttcatctgaataatcggcataggtatggattctcacaagaatcagatgctattttacagaagttttataacaagcttaaattttgaaataaaactaaagcatcatgatgtaggcaacatgggataaaattgtagcctaaccactgtgtatgctggagtcacgcaatttgaattatacagtctttgaggtttcatatgttttagtttaaaggctgactttgccatttgtaagctgggtggctttgggtgatttgtttaatatttctctgttagtttccttattagtaaaataaaataataatgttttcttttataggctttataataacgatgaaggtgctggtggagatgataaagtgatgatgatagtgttggtggtgatgatagtgtctctgcagtggctggaatatttatgcaccccccgctccaaatttaaatgtggaaatcctaacccccaaggatttggtattaggagatggggcctttgggaggtgatgaagtcatgaatcacaaataggagtagtgcttttacaaaacagacccccaggtagtcatttatcttttcatcatgtgagaacacagctaaaagattgctgtctatggaccatgaaatgggccctcaccagatgctgaacttgccagtgccttgatcttggacttctcagcctccagagatgagcaataaatttctgttgtttataagccatccagtttatgatgttttgttatagaggcccaaatggactcagccttacagttattaagcccttccttcttgccagtactgtgctgagtactctacatgcatcacctcatagcattctcagttgccccctctggtagctactatcataatccctattttcttttttcttttttattatactttaagttttagggtacatgtgcacaacatgcaagtttgttacatatatatacatgtgccatgttggtgtgctgcacccattaactcgtcatttaacattaggtatatctcctaacgttatccctcccccttccccccaccccacaacaggacccagtgtgtgatgttccccttcctgtgtccatgtgttctcattgttcaattcccacctatgagtgagaacatgtggtgtttggttttttgtccttgtgatagtttgctgagaatgatggtttccagcttcatccatgtccctacaagggacatgaactcatccttttttatggctgcatagtattccatggtgtatatgtgccacattttcttaatccagtctatcattgttggacatttgggttggttccaagtctttgctattgtgaatagtgccgcaataaacatacatgtgcatgtgtctttatagcagcatgctttataatcctttgggtatatacccaataatgggatggctgagtcaaatggtatttctagttctagatccctgaggaatcgccacactgacttccacaatggttgaactagtttacagaaccaccaacaaactaccatcagagtgaagaggcaacctacaaaatgggagaaaatttttgcaatctactcatgtaatgaagggctaatatccagaatctacaatgaactcaaacaaatttacaagaaaaaacaaacaactccatcaacaagtgggcgaaggttatgaacagacacttctgaaaggaaggcatttatgcagccaaaagacacatgaaaaaatgctcatcatcactggccgtcagagagatgcaaatcaaaaccacaatgagataccatctcacaccagttagaatggcgatcattaaaaagtcaggaaacaacaggtgctggagaggatgtgaagaaataggagcacttttacataatccctattttcaatgagaagttgaggcttgtggagttgcttaacatgtccaggatcacctaatgctccaacataagtttgattaactttaatacttttaatatatattgtgtctcagttaatgttttattgtgctctagtagtttaaactgcgttatcttgtatcaagaattcaggtgtaataaagattaaaagggacatgatgtatgtttaatatttagcatctgttccatagtaaatgctaaataactattagatatttaattggtattagatctatttcttttttaacttataaattataatagttattgattctattattgcctttaaaatttaaaaccattctgaaatgatgaaatggtttattctcctctataaggatgcaaaagttactattgcccatatcactgaagatgagggaatgccaagatttttaaaatttctacagaatagcaaaaatagtttcatcatttaggtcaaagtttcaagtttgagtaaggcttatattcatttttttcaaataactagcttgtatttttaaacaaatatcactaaagtctataatatcattatcttatgattcagtaaagaaagagaaataagctgtttaaatatgatgccatacaaattcattcaaaagagaatgatgcattcaataactatgtttgtgaatttggctctatgctatgagatacccaatttgtcttattttatccttgaattcatacttctttaagcttcaaggagatgtgatgcattagaaattgtagattatctgtggcaaatttgactccaggcttttagtaacacctcatttcaaattctcaaaagagaatcctgttgtcttaatgttttggtcttcgacatccaagtgtgttttaacctctatggtgcacatacctgcccaccactgctccttgacctgcagcttcactgaacatttgaactcttgttgcaatgcttatgttattgggcccctccacatccttgccacagttgattgaaccaaaggcaactcagtagaacactcctaatcctgccccctaaaccctccccgtaagtccttgtcatctcagtaaacgacatctccaatcttccacttgcttaggttatcaaccttaagtcactcttgagttctctctttttctcacattttattagcaaattctaagccccttatcaaattccattagctctgtgttcaaaacacatctggatatagtgattgatacccctgttgtttccactctaggtcaagatttcatatataatcacctgggctattgcaatcaccttctaacttgtttccttttctacccctgcccatttttgattgaggtgatttttgagactgtaagatcataccactcctctgctcaaaattctgcaagtcttggccaggtaaggtggctcatacccataatcccagcactttgggaggtgaaggcaggaggattttttgagctcaggagtttaagaccactctgggcaacacagcaagatctcatctctactaaaaataataataaaaaattatctgggtgtggtggtgtgtgcttatagtcctagctacttggaaagactgaagcaggaggacttgcttgagcccaggaggttgagtcagcagtgagctatgatcatgccactgcactccagtctaagcaacaaagcaaaaccctgtctcaaaacaaaccaacaaaaaacaacaaaaaaacctacatgtcttatattttacgtataataaaatacagagtccttcatggcctctgaagtttcccatgattgtgtgtctgcatccttctgtgatgtggtcttctatcacccttccctttactctgtaagctgacttgctttttcttaattatggtagacacacttgccccagggtctttgcacttaccctctcctaagaatgatctttccctgcttgtggctcggcttgctcccttacatcacctggccttctggttgaatggtgcctgcttgagggacctgtgagcaaccttcgaggcagcacctctctccctcatggcacttaccatctgttatctggtatcatgtcacttttcaccagctgtggtatcctttttttaatgacatgacttctgacatcacatttgctgttctctttttccataccaattctccaataataattagtgctcagcaagttaattcaatgctggtactaactcctggagcttgtagagatcccgctggttaaaggctcaatcccacaagactgtccctacttcagacgccaaccacaagggggtcccagcctacccacacctgtttagcagactagaaatttataggttcccattctcaggtttcataattcactagaacaactcacagaactcaagaaaacactttacttatatttactggattattataaaggattcgactcaggaacaggcataaaagaaatgtatatggtatggggtgtgatgtgaggagcttctgtgtcctcttgagggatgccatcctcccaggatctcagtgtgttcaccagtctggaagctccccagatcttgtcatctaggtgcttttatgaagatttcattacttaggcatgattaattgaatcattggacattggtgattagctctatctttagctcctctccagctggggttgggactgaaagttccaactctccaatcacaacgttggttcttctgcccagttgagagtcacctcattatcataaactcaagactggttgaaaggggctagttttgaatcacaagagacactcctaaaattccagtcacttttgtcactcaggacattccaggggtttgggagtctctgtgctggaaccagggacaaagatgaaatacatgtttcttgttatatcacaccagccaaactgcttcatattgttcttgggtgttgtctgtccccacttgcaagaacttagctctacagaaacaagtcacttttgccagttttattactggtctcatttagcaccccaagcagtgcctaatacaccacagaccaggggtgtctgatcttttgtcttccctgggccacattggaagaattgtcttgggccacacctaaaacacaccaacactaacgatagctgatgagctttaaaaaaaagcacataaagatctcataatgttttaagaaagtttacgaatttgtgttgggcggcatttaaagccatcctgggctgcatgtagaccatgggtcgcaggttagacaagcttgccatagacactcaatcagtacttactgaatgaattacttacgtgaattaaattggacattaattaatgcaatacttcatggaggaagaccataggtagaggcagacatgagtgaaaacacgctccatgagggtcggagacagagaaggagagaaaacaaagttgttttctttttctttttctttctttctttttttttttttttgagacagagcctcgctctgttgtccaggctggagtgcagtggtgtgatcttggctcactgcaacctctgtctcccgggttcaagcaactctcctgcctcagcttcgtaagtagctgggattacaggcgtccactacctggcttatttttgtatttttagtagagacagggtttcaccatgtcggccaggctggtcttgaaatcctgacctcaagtgatccacttacctcggcctcccaaagtgctgggattacaggtgtgagccaccgcgcctggcccaaagttgttttctgaagagctttctggttggatttttactttttcatgatactttgttttacttctttttcttggaaaattctctgagctttgcctctgtcctgaaaacaaattctccttttcttaagtaaggttgagtgggttttccatttgttgtaagccaaaataccttggcaaatgtaatccttctaagcctattagagtaaaaaaagtatgtctggtacataataggtgctcaaaaatatttgctgaatgaatgaatgatagctacaaagagaaaggcttgtatttcctattggcttcagggagaaagttctaacacatttgattcctggccattgtagtgccaaagtcagaaatgcattaagctttctgaaaggaaccatcaaacttggcctctttgagggcacttaacttcaaagctccaatagaaatattacaactattaattaaataactttattttttgggctgggcatggtggctcaagcctgtaatcccagcactttgggaggccaaggtgggtagattgcctgaggtcaggagttcgagaccagcctgaccaacatggtgaaccccatctctactaaaaatacaaaaattagctgggcatggtggcccatgcctgttatcccagctactctggaggctgaggcaggagaattgcttcaacctgagaagcagaggttgcagtgagccaagatcatgccactgcactcaagcctgtgtgacagtgagactctgtctcaaaaaattcaatcaaccaaatcaaataaataaataactgcctttttttgttgttgctttgagatggagttttgttcttgtcgcccaggctggtctgcaatggcgcaatctcggctcactgcaacctccatctcctgggttcaagcaattctcctgcctcagcctcccaagtagctgggattacaggtgtgcaccaccacatttgtctaaatgtatttttagtagagttggggtttcaccatgttggtcaggctggtctcaaacttctgacctcaggtaatccacatgccttggcctcccgaagtgctgggattacagacatgagccaccgcgcccagccaaagaaatgtatttaaggtcagcatcagggactgaattttttctgcctgcagaattgaaaactgtggatgctgttctgtgaatctccttcatagcaggcttgaaaagttgttctgggactaaacgtttgttaaatgggggttaacaatggttcactctgttcacctctcaccctactccatgcatctcccagttctagcccaacgtttatgccctcccactgtgagatgatggaaggctgaggggagaaaagtagtgtggtggaggaggggagaaagattgtgctggggaagtctgggattggagaaacagaagggtgttaatgcgaaagaaggatgaagtgaggggcagcttagcttcaggtaaagatccaactcgggatgtttctcactttgcccctttgttctcagaatcagcgtggttcacttgacaacataaacagatatatgctgttaaatggcccattagaatgcaatgaacatgagcaggacttaccctttgaaactgaacagttcctggaaactcctaactctgcttttctgaccacaggctcctctcgaattatctgattttaggaaaatctattagctgtgactaacactgaaacagcctattgtatgcctcaggacctgccttctctcctggaaccatactgtggggtagctatgaagatgttggttgtatttccttcattattcaataggaaaaactgagaccaagaggagttagagaatgtgtttgcccaaagtcacacagtagaaggacagctggctttcaaactcagctttctctgactattaaagccaacttagaacatacagcatttcttgaagttttaatattcttcctctcctaatttgttttttctttcttggtaactaattttcactaagacagtttgcatgctcttgagcttatagctgaaactgatctatgccagtctttctttaattaaaaatcaggccttaaaagggggatggaaaaggttgagtttttgtcactttttgcagcttgtatgttatagtgcttggctgtgatttgttttcagccagaggacagccctttggagaagaacattatttgagggtgttcccaagcgggtgatggtcactgtccagtgggagagcaggcggaagttcttaccctgctcacatgttaaataatccaagtggcattgctctgagcacttgtgttatttatagtgggtctaattatgagtgtccttgccctgaaaggaagttgtcttccccaagggtgggtgacagactaacaaactattgagctctagcaggagaacgtggagtcctgtcctcttagttggttgaaaatcattaaattacccacctgattaactagcgggtacagaggaatattacaatattacagggacaaatgggaatatactaattgggtcaagatgaattcccttttggacttgaacattaaaattcttattttattttcaaatatgcatcctttgaacgtatttatgcagggaatatgcactgtcagagaaaacatccattgaagtaccctaaagagcaagtaacatatggtgcttttgttagtttttattactgcactttatttctgaatagctgataataattgtgagacacttaaggctacaggtaagaaagaatatggaaaaatctagatgcagatctggtcttgagatgttaaagcctgttactcaacctgttggaagtttcttcctctacaatggagacaagaataatattagctgggagagttaaataggctacattgatgcagaagtccagattttaggcttttactaaatattgatcattattctccatttgaaagtaaaccatgttttactgccaatttttacgatgaaaaaatttttgtggttttgcaaaggtaatttaggcaatcctttgatctccgctgaaatgatagagggatttgttagaagttgtattcaggccttctaatgcttcccatttgctgattcaatgtatttggaagatttgcctacagattcggggccaaacattgagacacaaatagactttttgttttaaatttgtgcacttgagtgtgatattttttcatgccagcttccagtgacaggctgcatagtttattttctgtggcaaccactttccctcactaagttttactctttaagtctagctgcctctcccattaaggttcacccttctctgatctctggcccagaagcctgcgtgaaagtaaaccaagatttttctttttttttttttttaactatttcctgcattcctctcttttaggtttgatgaggtcagatttcagaattgccaagctgtttcttccttcctctattcataatgttggataaagacaggctgtttaaagagcactttcagtctgaggggtgtcttttctgtgcattgtgaagggtgaggccccaaagctgggacgacgacggcatggcgccaggatccatggagttttagctagtgaatattcaggaaagaaatgtatttgtgtcctttgatccagagctggctacccagggtgctggctggcaagtgaaaggaaacatggaagctgacaagtctgatgttaaagaacattaggagttgtgattgtcttcttaggacccaaactgaactttcttgctgcagactcttggtttgcttatgaaccaagtgagtacttggcagaaaccaagtatatgggatttttaaaaaccccaaaatttaagaacacaaagaagatgtccaatttctagaagttccctagagccatgtaattaaactgtgtgtttttttcagaaatacctggaacacctccattttccaataataggtatctctttatatacatggctgtgtctgaactcccggagaaaagagtagggctgtctgttttcgaaaagcagtctttttttccctttctgaataccagagaaagaaaagtgcaatttcttattcagaggtggagatgctttaagatcaattgcttaactagaaggaggtaatatctatgaaacaatgaggttatagttattatagtccatgttacatattgaggtacaattttcctggtttattgttgttgtttaattttactgggaagtggttcaaaatagttgaggtttctgtagaggtctgataaggatactgagataattgtagttttagaggaaagaacaattcacgaaagttatttccttaatatttctgtctaaaattaaaagcttgagcaacttgcctgaaaacatggattttgaatgatatatggggtctgtttgacccatataattgcaattctaattccaatggcaaatttcaggatctttcgttcagaattcaccttctgtttgagaatggccattttaaaagttttttttaaattcaatttttttcctctacaattaatagctattttatggtttgactaatggagatacatttcaagcgtacattcatgtgcttaggattttatgaagcttccttacacttgcaattccctggctgttaccaggaaacagccctcagctcgctgctttcacagaaccatatattgttatggcatccacagctaaattcaaatcgaagagcaaacctctcaggtttgtgtgctattaggtgatacatgcttcagttcccactatgagggaggtcaaccccagagagctttttgttatttccccaaaatggaagctgggaaacaaagttgcttccttaagaataaagtaaaacttacttccctgggaaggtggaagtgagtagaaatggatttgagaaagaaagaacattttaaacaagaattcaacaaagtggcaaaggaatacagggaaccagtttgtgtccaccagtaagatttaaggttggtgtatccttgcagtggaaagctgtgtatgcattagaaaaaaatagttagggctatggatattaagtggaaagttgcctttgatttgctttctacaggaagagtaaaggagaacactgtggaacataatacatagttgatgcgatcctcttaatttttaaaaatacacacatatactgggcgtggtggctcatgcccgtaatcccagcattttgggaggctgagatgggtggatcacctgaggtcaggtatttgagaccagcctgaccaacatggtgaaaccctgtctctaccaaaaatacaaaaagttagttgggcgtgatggtaggcgcctgtaatcccagctactcaggaggctgaggcaggagaatcacttgaacctgtggggcgaggttgcagtgagctgagatcgtaccattgcatccagcctgggcaacaagaatgaaactccgtctcaaaacaaaacaaaccaaacaaaaactcatacatgtatagataaataggaagatagaattatatctctatgggaattagctttggctgcagataccctcaaactcagaataatagtagcttattaaggtcgtttagttttctttcatgggaaagaagttaaagttagtatcgtagttccatggtcaacaggaaacctggtatctttcatgtgtctgctccaccattcttgtatacggcttcccacctagaggttacctcatggtccaagatggctgttgaagctccacgcatcatgtatcttcatgaccagaaaaaggagggatggaagaagagtaaactaattttgtcccttctcattttaaaaaagccttcttggaaagctcacacaaaacttcttatatctccttggccaatatttggtcacttggctttacctggaagaatagaaaatacagtccctcagctggcacattgccgagggttttgtactgccaaataaaaagagaatgactgctgggaggcagctttttggaactgctgcaagtggcttcctttggtcactagaagtggagatgaagagcgggaacccttccattttcttctttatatacttttgtactgttgtattttaaaataatgagttaaaaaaaaagcagagggatgcatattttaaagaagaaatgaaaacctaagtggagttgtggtaagtcatcagtccaagattagcgacatgatagaaaagatgattctctatcttgcttggacctactctttgatgttaaagcatctttgcatctttgaatggatcacctcctgcatgactgttctctgggtcctgagcagggagagacaaccaggtgcatacacaatttggatttcatggtctttttatctctactaaaactatttgcagagatacagttctaatgacaaatgctaattattggctgtcacttagccttctaatgattaaatgcaaaggcattagggtgttaaggaagatagacataattataataataagactaaaatatatggaatgctttcttgaagtagtatattccattgaacaataattgctcttcaattgcagttttaatattctaaacctcaacttctcaccttgaaatactactactaataatagttcctttataaatcatggaattgttataagagttaaagaagataatgctgattaggtgacaggctgtcccttaataaatgctcaataaatgcaagatgaggatgattttattgttggcatagcatgtgccaggcattctgtaattattttgaattttacccccaacaacaagtttataagggtgactttaaaaaaaaaaacagcattattgggatataattcatataccataagattcatccttttaaagtgtataattcagtatttttagcatatttacactgttgtgtaaccatcatcacaatgtaaatttagaacgttttcatcattccatagagaattcccgtacccattaacagtagtcacttctcattttcccttccatcaatttctgaaaaccacaaatccactttctgttttcatgcattggcttcttttggaaatgttgtataagtgaaatcctacaatacatggtcttttgtgtctggcttctttcacttagtacattgtttttgaagtttcatctatgttgtagcatgcattagtactgcattcctttttaaggctaaatgatattccattgtgtggatagaccacattttgtttatctattcatccatttatacatttgggtttgttaaattaagtttagcctacaactgtctctttttatatattttaagtttagcctaaaggttttttgtcaactgtagtttactcttgtgtcaattactgaattttggctaatcaaagatgaccaactgtttaaatcatgcacaagtgccatggtgtgaccaatttggctatttctgtatctcacttttgtttctttgtcctttatttggtgtgtgtctataaatccttttttactatgtggctatgctaaagtctctgtaagcctattctggcttgagagtctgccctattactcattatttatttgacatattttgagatggctgttcagggggccagcagacagaagcaacctgcaaagctgttttctatgggcgagatttgcatctgtagagagtctacattgaggcagccaaccctacccttgtcttgatctacggaagattaactgagagtctgacacctttaaagaagaaacatttactatctcttctctctgagggctgctacctgtttgatttcatttacacaagaccacctttgctaaccaagcctcctcttctctacttcccatgacctgtcttgccagtctaacctggtttatcagcctagcctaatttgggccatcctgagccctcattctttctgtaacctcaagatggtttataagcttctgcaccccatcgggtagttggggtattcactctgtggttctctcccatgtgcacgttaataaatttgtatgccttttcccctattaatctgtcttttttgagttgattttttaagacagcctttagagggtgaagggaagcttcctttcacccctgcaataccctgtacacccattatttcccaaatgtaagaatatatatgacccacataagaatataagaataaaggggtaagctaagttcctgtgagcggaattgcaggatcagaagatgtgtatattatgaggaacactcttgtcaagttgcccttccatggagactgtctgaaccacactcctatgtgttatgaagagcttgaggcaatatttctgtctggaccaattataaagaatagttgtgactttcctcagtaattggtttgtttttgtcttatggagaatgttattcacaacttaccaagcttggattatgttgcttgcttagagcctttgtggtccatcatgaatgtctgtgaaactatattctgaacgtttgttagtgtcactccactttcatatattatgtggtattggaaaagcctttcactggagcttaaaattctcactcaggtgaatcttgagtcaatttcaattttagtcatagaaccccagagctccaaaagactaaagcgtcaagaacctagtttatagccagggaagtctttcaattttgagtgagtttgggtaaaattcactatagatagaacacctaaggataaattgatattatagaggaaataaatcaccagcttctctcattttataacaaatcagagtaagaatgccattccagggctttgcaatattcagcaacctcctacaagcttctttttgtctttggatacaaggaagatagaagttgagtctcttgcctccacgtattactattggagacaaagtcttggggaagtcaggttccaattagtttctaggggaaaggctctcactttcttcatatcctttgaaaaagcaatccagtaaaactttacaaagtttccaagaaagcgcaaagaaagatttatgtgaatgccactggctctactgatgttatgtattctttaagttggggattcatttatttcttcattttacttggaaactgttttgttttgtgctcaccatgacccaattactataatttgagcagtgcataaagcaggctctgcccctcatagaatttacagtctaaagagagataattatacaaacaattactttaagtgtagtttgtttatgatggagaaaggtcatgtgttctgagtgtggatgagaggggcctctcatgtaattgatttatgcagcaagcatttgttgaatacctacagtatggtgatccctgtgctagagctggggatacagtaatgaaggctatagacaaataccctccacctctggaagttggagtctagtaagagcatctctcatttattaaacacttatattccaggccttgttctaaggtgatttaaatgtagtaactcatttgaccctctcgacaacccagtgtggtagataggattacaattatctcatgaaggacagagaggttaaacaacctgcccaaggccacactgcatgtacattttggaattaacctgctcgtgggcaggtgggctcctgaggttgtgttcttgactttaattgtatatgcttctccctattctgtgtttatagagaagaaggcattaggagaggtttcctagaacaagtaacatgatacataaaagataagtagccaagtggaagggtgtggaatgggaagattgttccacatagatgcattgcgcccaggtgcaagaaagaaggtggggaaggtggcaatagtttcaggaaagaaaggagcctggtgtgtgggaggctggaggtgggtatatcttcacagcttggcacaagtcttgtaggttgcctgcagactcaagactttatgtgccgggactgctgctgttctcagcctctgttttgtttcttttcatactgagtgatcttcaccgtgtcacttttgctcttgttttctatgtctgcctgctggcagtgactttgctagccaggatcaagtttgggcaagataccaggaggctcagagacctgcgatctgagtggcatttcctcaggccttgtcctgacctcctggcccagagctaattgtgctacctaagtttgaaaatgctttaaaatttcaagtatatcctcctgggacaactggtatgtcttggcttgataaacaagttgatatctatgtctacctgatcctaaggcatttgccactctaatttgtcatcttgttggtttccaacgtgacaagtactttggttgtacattgcctcatccagtagaccaaattctgattaattattccttttaaatctgggataatggctttaattttgagaatcctcttctttgcctaatgccttccttttctcaacttcaacaccattgacatttttgttgcagaaaattctttggtgggggctgttttgtgcgttgtaggatatttgcctgcatccctggtccctacccatgagatgccattagaaacccctctcagttgtgatgaccaaaagcttctccagacattgtcaaatgtccactgggggacaccatcactcctagttgagagctattgctgtaagcataaaggaatagtattcttcacctatagtcctgtgtcattgctatatggattgtgtttatgaactggatgatgtattataagaggccatttcacagcatttcaataatttgaaatttaaacatttttttctaacctattgtagttaaattaatacaaataataaaataataaaacatccaattaacaaaagaatgcataataataaaataatagctaaccttattaagcactaagtattgggtaccttatacacatagctgtaagttctgcactaccattatcatcattaacagatggaaaaactgaagctcaaaagggtaagttatttactcaaagcagaatgacagtattttttttactttaattctatctcaagcttctcatatttagagcttaagctgaacctctcttaatattaaatttgtgatataataaacaatatttttatttctgattttgtttattatttgcttgatgccagaagataaattactgctttttctaggaggacaattatatttttgattaatattgtaattttagagaaagtggattcccaaaatgctgatcatttttttcagctagcagtatttatagacagcaaccatactataacttatttgataattatctaatttttgactatttttctagtggattattaaagtattactttattgtcaggagtaaattcctgaagaatgaattcaaaaagaaaatagccagtatggctggactacccattataaaacatggatggtggtaaagattcgtttttgatcaaaccttgggaatttgagctcagggtgcaaagcagggcttaggagagagatgaaattgatttcaaatcttttttgcttctttttttgagacagggtctcactctattgcccaggcgggagtgcagtggtgcaatcatggctcactgcagccttgatccctctgggctcaggtgatcctcccacttcagcctccagagtagctgagactacaggcgcacgccaccatgcccagataatttttgtgttttattgtagagatggggttttgccctgttgtccaggctggtcttgaattcctgggcccaagtgatctgcctgcctcagcctcccaagtcctgagattactggcatgtgccactgccacatttcaaatgtgactccataatgtattagctgtgttaccttgatcacattgcttaagtgtctgagtcctagttgtttaatttgtataaactggacattaacaggtcttagctcacacagtttgggtgacatttaagtgaaagcatacacgtgaaatacttagttgaatacctgtcaactaagcagtgaagatctgtgaggaggaggatgatgatatattacaaatagtgtgctgacagtgcttaatatctctcatccttaaaacaaacaacaaaaacaccttgcagatgctgtccctttcatatctcttcacaacaagaattgattttgaaagcatgtttctttctttctttctttctttctttctttttttgagatggagtctcactctgtcgcacaggctggagtgcagtggcacgatctcggctcactccaacctccaccttccaggttcaagcaattctgcctcagcctcccgagtagctgggattacaggcatgtgccaccacgcctggctagtttttgtatttttagtagagacagggtttcaccatcttggccaggctggtcttgaactcctgacctcatgatccacccgcctcaggcttgcaaagtgctgggattaaggtgtgagccaccacacccagccgaaaacatgtttctttcctggaagttatctgtgaaaatctgcaactgtctcctctatggccacccaggtttccttcccttaaattcttggcttaaatttttttaccacatgacaattattcttccccttctgcccttttctggcaacatctgttccttgtgggttttttttttaaagagtgctttctcaaccatggaattcatttctcttcccttctttgagactgacattctaattttctatactgagccttctcacaaaatgtcttttactgaatgttgcttcaataatgtggaggttgagagactgaaccttgctgaaatgtttccttgtgaaattattacagtgattcaatttcagaacagacattttttaatgcaaaatccctaatttgggatttttttttttgccacagtagagtgatatatctccagttttgctacagcttgtttttaacaaatatattctatatttgttttatctatatggaaatttattcatcttgaggttctgtggttttagaacaaaactcactgatgtttgaaaacattgatgtgacaaatggccagcagagcccttctccatggtataaaaagtagcacttggtacaatgaactttttaaggaaaaatgtgtggagcaattgtttaaaagaatgtttctcttaaaacaatgtctctcagtatgatttgaatatttgtactctacatattctggactttttaaaaaaaataataaacctcttatataaatatgttaaggcatgtttggaaatgtcaggcctattctgaggcttttgatccaagggcctcatttatgaaattctgggaatttcatgagttctcagtatgacttttgcccactcatttttttgctcatttgtttattcactcagccattcaaaaataaagaaatgagaacataatactcttccaggccttgaggattcaaagtgattcagataaaatatagtgtgtttttatattctaaagaccaaggcaaaaactaaaaatgcagacaaatcagtaagcaaaataatttaaggtattgacttgaggtcaatttgtggaggcctagggggtgctttagatttgggagatgggaatgtgtctctgagatggtgacatcatggtagactgtgagtgcatcagtggccttagtcactgccataatctttgctttgtgactttattgtctccatcaactctgactctgggtttaaccatgtgagataaaatattagcaaacttgacacagcaatggcttataaaagtatttacaggcttccacttttgggaacagtgagtaggtgtgccttttcttactcctctcgctgagactataaagctgggacattgcatgtaaatcaaacctaagaagactctgaaaggtggagagaagaagttagccagactaacttttgcctcatagatcccacacatggaggtaaagaagccaacaacccagaaaccccaataggcacacacaaaaaaaagtcccagcaaaagcctgctctccctggccagaggaccaggaagtgtggcagcctagcaaggcaagaaacttttagataagagctgctctataccattcaaacactaaagaagagactgtggccccaccctctccaatgaaggccaagtgggggacctagtcttccaccctcatgagactgtaatgagttatcccaatacttcaccaagatgatgtctgtgaaggccgagtcaggagctcagactctcatccacacccatcagtaacaagtcctccacaccatggtgtctgcggagaccacatgggaagcctggacttctaattctgctcagtaggaatgaggtgctccttccttccccactagggtggtgtcagaggagacctaatggaatcagcattgcccagtggtaatgaggccactcctactgcagaaccagtggaggccgcatgagcagacagaatccctaccaccccaacccagcaataatgcgggggcctgtcaagtatcattatcaataatgaggggccccgtcaagtatcaagtatgattttctggggattctggatttctaccagcagcaacaagaaggcatactttcctaccccttctcctgttgtagcaacattagaggcatcctgttgaaagagatttatttaagatctagaacctcataacataatgtgctaaatacttaggtttcaataaaaagtacttattataccaaatcaggaagctctcaaacaatgaatgccaacacagaggtgatagaattatctgacaaagatatgaaaagagctgtgataaaaatgccccaaggagcaattacaaacttgcttgaagcatgaggaaaaaaattgaaaatgttctcaagagaaatgagatagaaagaaggcccaaatggaaattttagaactgaaaaatacaataattgaaattggatgggctcaacatcagaatagagagaacacaggcaaaatagaccgatagtaatcatccagttggaataacagagaaaaaatagactggaaaaataatcacaagagtttcagggaccttgtggcattgtaactaaagatctaacattcatgtcaacagggcccagaaggagaggagagagacatgggactgaaaagtgtggaagtcctcatctaccattgctgacagaatcttggaaactgtgactttaagtgaaatgatgtacaagttctttttttttttttttttttttttttgagacagagtctcactctgtcacccaggctggagtgcagtggcacaatctcagcttactgcaacctctgcatcctgggttcaagcaattctcctgcctcagcctcctgaatagctgggattacaggcacacaccaccaaacccagctaatttttgtatttttagtagagacggggtttcaccatgttggtcaggctggtcttgaactcctgacctcatcctcctcccgactcggcctcccaaagtgttgggattacaggagtgagccactgcacttggccacaacaagaagttcttgagtaatgtcgtttcattattatggtgagaaaaaaattggttttattatgcactttttttttttttgctttaagtcacagtttccaagaacctattgatattaagggaggacctaataaactcaatgaaataatggctgaaaagatttggcagaaggaagtttactcatccagtgctaagagaaaagaactgtcaacccagaatcttatacctagcaaaaatgtccttcaggaatgaaggggaaatcaagacactgtcagatgaaagaaaataaagagaatttgtcaccagcagatctaccttaaaaaatagttgattaagatttctaaacagaaaggaaacaatacaagaaggaaccttgggacatcaggaggaaagaaggaactcagtgagcaaaaatatgggtaaacacaatacgttttccttcccctctcaagttttctaaattaggtttgatgtttgaagcaaaattataacattgtcttctatgtttctaactggatatagaaaaaatatttaggacaatgataaataggagaagtaaaattatgtgaagggtggtaaagtttatcccagagaaataatgacttatggtcacacaaaaatctgtgtacgaatgtttttagcagctttattcataacagtcagaagctgaagaacctagatgtccttcagtgaccaaatgggtaaacaaactgtgttacattagtacaatggaatatcatcacctgggtgaatctgtagagaattatgctaaatgaaaaaagccaaatcgaaaaggttacatactgtatgattacacacatataacatcgttgaaatgccaaaattatatcaaaggagaacagggccgggcaccgtggcttacacctgcaatcccagcactttgggaggccaaggcgggcagatcacaaggtcaggagttcaagaccagcctaccagcctggctaatagggtgaaacgctgtctctactaaaaaatacaaaaattagccaggtgtggcagcctgcgcctgtagtcccagctacttgggaggctgaggcagaagaattgcttaaacccgggaggcagaggtgagatcgcacccctgcactccagcctgggcaacagagcgaggctccatctccaaaaaaaaaaaaaaaaaaaaaaaaaaaaaagtggagaacagattagtggttccagggcttaaggcaggcaaggaagtagttgtggtaatgaaagggcaagtgagggatcctcatgatggaaatttttctgaatcctgcctgtatcaatgtctgtatcctgactgtattatactatagttttggggcatgtttcccttagaagaaactgagaaagagtagctacaatctctctgtagtatttgctgcaactgcctgtgactcaactattatctccaaataaaaagattagttgaaaaatgaaaagcattttcaatgtctgtttgctgtcatgggctcccgcttgctccagaagaataagccccagataggctattggagaatcagacgccatgagccacagagctaagtcattccaggcaaccttaagacaacccaggacttgactgctcatgtgtgaatgaacccagccatgattaatgaagccgggtcagatcagccaaactgcccaatcaacagttatattcatgggaagcgataaattgttgtttaagcagctaagctttggaatgattggttatgcaacaataactaactgatagagaaattccacctaagacgtgaaggaggaaaaggagtcaaccacgtgaagtgcagcggaggaaatattctcttatctcttgtcagagaagaatataacactttggaggctggcctattatgagtgaagtaggaagtggtgggatatgaggcctaatgagtaagcaggggtcagttatatagggtaggctaagcaactggaacttagtcttggtgactactcagaacacctctctaagtccctttggaagccccagggagatcattgcttttttttttcaactctacaaaaatacctattgggtgcataccacaaaatgagtgctctgcatagatagtctatcaccattatgaccacagacctggtgttgtgcgagggcctggagtgccttgttatttgtccctacgtaatagaaagtaaagtttctggactttgctttctgtactgctctttcctcattgcttgggacagtgtctgtcttgtaattggtgctcagtagatatctgcagaataaatgagtaaatgaaggaaacaaaatgtgttgcccttgtttgcatgcaaatcaccacctagctggatggtatgaactgctaaccactatggagtgtttgctatataccaagcaatatgctaagtatgttatttatttatttgtttattgagacagggtttctgttgcccaggctggagtgcagtgcatgagcatgactcactgcagcctcaacctcctgggatcaattgatccttccccacctcagcctcccaagtagctgggaccacaggggtgcaccaccacacctggataatttttttatttttctattttcttggagatgagttatcaccatgttacccagtctggtcttgaactcctggcctcctgcaattcttccacagtggcctcccaaaatgctggaattacagatgtgagccaccgtgcctggccctaagtactttacatgcactgacatattcaatctcacacagccctatagggaagataatattattgtgtttatagagtgcaataaaatcttgtatatatagtctcatatacacaatgtatacagaactacttcttcattatgctattaaatataatttttatacaggcttagatatttaataggtgtgacaagctcaatatccccatccccaaacttcacacctccctactgaacttcgtccttttccaggctttctcagctaatgaaaactccattctcccacttgcgtgagctaaacattttggaatcatcctagacttttgtcttaaccttacccttacattcaatcccatcagtaaatcatgttgattataatttcacaatatgtccagattcttagcactttccacttctcctccactttcatcgtggtccaagtcagtatcaccccctgcaatgtttgttgtgaccccctctaactggttccccgacctgcgcctttcctgccctacggtacctgaagttggattatatcacttccattcaatgcttcgtctcacttcccatctcagtcagagaaaaaaccaacatctttactcaattatttatttttattttttactttttttgaggcagagtctagttctgttgcccaggctggagtgcagtggtgcaatctccgttcactgcaacctctgcctcccaggttcaagtgattctcctgcctcagcctcccgagtagctgggattacaggcttgcaccaccatgcccggctaatttttgcatttttagtagagatgggggattcaccacattggccaggctggtctagaactcctgacctcaagtgatccacctgcctgggcctcctaaagtgctaggattacaggtgtgaaccaccgtgcccggccaagccaacaactttagtgaaacccataaggtctgaccgtgctgacccacgctcaccaccactgccagccctgaactcttctcctatcttcaagcttctttattctccctttaacatgctggacatgtgtctgactcaaggccatttatttcttccacctagagcccacctccctcacatatccactctgttgattgccttgtctctttcaagtcgttgctcagatgataccttcttcatgagaacttccctgatcatccctcaccctatttaaaatcacaatacccaccactagcaattcctatcactgtccttggtttatttcccttcgtggtgcatcacaccatgagacatattataagatacacacacacacacacacacacacacacacacacacacacgcatgtaagcatatatatcttattgattgtatgaaagcacaacaaagacagcagattttctcccttttgttcatagccatagcccctgtacctaaataatgcctggcacatggtaggcacctgataaatatttgttgaatgaattaaagaatgatatcagctctcaaatttttgtttaaatagaatgctcacccagtattttagattttctggcatttctttagtgtctttacttttttctataaaactagttagaaatcgaagctagacaaataaatataacaaattatggcttctttctgcagtgcttctgctttggagaagagaaaggcattggagacagagaaggaaaagcatatataactttctgttttagcgcttgcttggttgacactggtcaactttgtactgacaaaggaagggttccctgtgtgtggcaagaatgctctgagctgttcatggcagatattgattccatcagaatgttttcaaaataatatattcatttttattatacgaaaaacacatactacaggacatatatttatgaaagaagaatgtaaaatgaagaaaactgcaaaataggttacaacatagggaggtgccagttcttgagggttctggaatgtcttattaagacgttgatttttattgatttttgccctaaaggcatcaggcagccacagaaacactttaggtaaaggagcaatgtgttcagattactgttgccaaaatcaccccagatgctaggtagaaaatggattgcaatgtagcaagaataaaacagggagccctctgaaactcagaagatggtagcttagagtagagtagcatagagttggtagcttagagtagagtagcatagagtaagtagcttagagtagagtagagtcccttgcagagaaatataaatattcctggtttaactagagggtaaaaatacacagaatttggtgactgatgaattgtgttaaaagataattttcaaaacaggtaaaattatgactcttatacaaatgtagaatgaagatgtgttgaagtttctacttaactcattaattaaatgaaggaacaacgttgaatattataactagttcaaagggtaattcaaagaactcatacatttatatatcccgaatgatgaaatgaatattcaaaaggaggcaaatctagcttcgtggacagtggggggtggggtgggtgggattcagttgaacctctactagacaggacataatttgcatctttatagactagaataattttgcattgttttcacttacctacaacttacagagaagtagaatagctcccacagaatcaaaagcaggtaattctcaaaaggtacttgctacagaaagcccaattttccattgaagtgcagattattccctagaattgctgtgtgtgtgtgtgtgtgtgtgtgtgtgtatgtgtgtgtgtgtgagagagagaaagaaagagagagaggagagagaggaggggaagggagaggattacgtatagctcaaatcttgtatgagcaactgcaacctccgcctaatttacagaatgagtgtatatgtatataaactagaagagaaacagattaaaaagcaggggcaacctcctttatgtacttaataactgacaaatagcattttctatggtatacatattattttacaatatcatttctaatgatggaaacctctagtttacacatttgccatgattaattaaaccagtcctctgaaacatttagagtatttccagtttttctccagagagccctattcccatacctgtgcatatttccttaattatttcctcaaagggaagttcctggaagcagtatttctgggtcaaagtgtagatataattctgcctctagaaaggccgtgctaatttacttcaccaccaggaaagggttggcttagctaatttattccctgtggatgctttttaaggatttttaatcttctttatacatattttacttcatgattaactaacccatttttgctggtatttttctttacagtaaatttaaaatatatcttgatatccactgttcaattttctccaaattggcttttctttccttacaaatgaagggtatatatgaatcttaggcatagaatcatgttgtttactcattaaaaagattttttttccttcataaaatacatgattctgacccagctcattattttggtaagtggaattggtagcagcctgtatattatgactgggggaggccctagaaatcactttttgtagtcttcaagcaccaactgtgaaatcctgtcatgacacagtcattcataggatggaaaattctgactttcttggcctcagagatcatccaggccaatgcccttgtgactgctcaatgggttcattttaatcactccccaggtacagccaatttgtcaagacagaggaattgcagtagggaaatagtttaattcacccagagctggctgaacaggagaccggagcctctgtggacatttggaagctagggtttttcaaggatagtttgatgggcaagggaatgggtgctgctgattggttgtggatgcagtcacaggagtgtggaaaacagtcctgtgtactgagtccactcctgggtgggggccacaggatcagttgagtcaagagtcataggtctgggtggggctattggtggtcaacaatgcaaaagcctgagaagacaactcaaaaggccaatcttaggttctacagtactggtgttatctgcaggagtaattgaagaagcagcaaatcttgtgacttccagaatcatggctggtaattctttatgcctacatcttagcagaatagctcctctcatcctcctaacctggtggtctttcataagttttacaaaggccatttagttctgaagaaaagtgattatcatttaacctataaactaaatttctcccaacgttagcttggcccaagcccaagaatgactaagggcagttttgagattaaaggcaagatgagggctgattagatcaaatccctttcattgtcttaattttctcactgtcataatttttgcaaagatggtttcactcttatattgcagaaggagaaatttgcagacaatggcagataggatggaggggcattacctgtggggcaaactcctatctcctggttctccttggttaacatctccacccttgacttccagattatatcaacccacaccattttctgtggctattgaaaagcctgaaagtgacagaggagactgagactctaaggggatagtgtcagccaaattggagggttgggcactcatggagaagtgactggtcagccccagatagtggactgtccaggccagcagggagtcatttagcctgaacactagtttaccaccaccatggcagaggaagagcaaaaggctgagagttagagaagcaatgaaatccaagaagagttgagaagttgtatgagataacatctaattctaatgtagttagaaaaatacttagcttggcttcctgcacttctgtcaaagacactgactatgctatcactgaaggagagataatatggagttcttttcaaagcaaatacttcttgcagattgctaggatacatggagtcctggattagtgtcttaagaacccagtttcagaaaaactcccttcaaaactatcactgtgggtgaacacttagtgccagtgagtgaacttaaaatcacaaacgcaaatgtcacactgaaatagattatctataaagtagtcgtccagatgaaacagcatatggctacaactaagtgtctctttttagattatgataagcatgaaaataaacttcttacagatggatcgaccatcagcctgagtttatgcatccctaagagtccaactttgctgaaaaaattcctggagtagtggttaagagcttattttccagattcaggcaaacaaaagttagaatcctggcatatttctcctagcttttgaccttgagtaagatgctcaacctcactaaaaacaaaatttgctcatctgtgaaataggaataataatagaatctgccaaacaggaatgttgggatgactaattgaaataatgcatataaaaggctcagcattccacagtgcgcagaaaaagagttcagccaatgctaggcattaatattaacatcctgcttgagaaaaatatttgatttgctttggaaagtaagtgccaataggagtagcacatgagaactgaggctaattcagtcagcactgtgaggatatatatctttttttttattattatactttaagtactagggtacatgtgcacaacgtgcagatttgttacatatgtatacatgtgccatgttggtgtgctgcacccattaactcgtcatttacattaggtatatctcctaatgctatccctcccccctcccctgaccccacagcaggccccagtgtgtgatgttccccaccttgtgtccaagtgttctcattgatatatatctttagagtttggagagaatgctctgagaagagaaagtcaatgtgattacagaaagggaatgctggcaaaatggaaaacaattttcacctacttagttaaattgtaccttaacttcatagaataactatagaaacctaactgcagcccagtgcaagagatggggatgctaatggatctgcatgagaaagtgctcttcaggatggcatccaccttaattgtagaacagtgattccccaatggtggacagggagaccagacatttggtggagggggttgaaaaagcctcaagtcaacattttaatagagttttattggagtagaatcttggcttatggggagatgtggaatgtatagggattccacagaaggcataattacttccatttctccctggagagacttgtcaaacagatttctatgagatctgagcttaaagagttgagaaatactaccgtagaccagaggttggcaaactatggtccacaggccaaatctggcccactgcttggctttgtaaataaagttttattggaaggtatccacactcattcatttacatatattctgtggctgctttcatgctatatttgctgagttgagtagttgcaatagcgacctgggggctctcaaagattaaaacatttactctttggctcattacagaaagtttgccaactcctgtggtagattataaaggcctaaacagccccaggcagtgtactatttcctttcaacaggaattttgtgaccaaaatttgctattttcttcataacagtccttgaatcctttagaagtataattgttactctttaagacattgtgaaggcttactattatagtaaaattaggaattctaagcaaattcttaattgtttcagctgcttcttagaactggaaattttggtgaacttaccagaatattctttgctaggaaaagaagccaataaaaaatgttagagattttaaaccagggctaagcaattattaagggtatcaaattttaaaggaagaaaagacaaaggaaaaacagaagaaattattcatggattggtgacaatttaaggctgaaaattaggtataataaaatcaccaccaccaacaacaaagtacatgctgaatgagattttcatgtaactactaaatctgctgtctttccacccagcttattagaactgtgtgatgtgcttatctgcttaagctttgacagtggcctgtggggattgacttgttcaaatcaggggctttgaagatattcacaaagacacatatttttcaaatatacaatttcagatcagcatgcattcagctgtggcagtggtcctcattttgccccccagaggatgtttgacaatgtctagagacaattttggttttcagtggaggtgggagaatctgctactggcatttagcaggtggaggccagaggtgctactaaacatcctaccatgcacaggataaccccccactagaaagaattttctggcccaaaatgtcaactgtggtaaaattgagaaacatgatgtataggaggtgagctatttcaacatggaagttatactatcattgaattctcatacagtgtatttacattaggattacctatcttttatttatttatttatttatttatttatttattgacactctgtcatgaggctggagtacagtggcacaatcttgactcactgcagcctccacttccctgggctcagatgattgtcctacctccgcttcccaagcagctgggactacaggcatgcactaccacacctaatttttgtatttttttttttatagagataggatttcaccatgttgcccaggctggtcttgaactcctggactcaagcaactcacccacctgggcctcccaatgtgctggaattacaggcatgagccactgcacccagccaggattaactactatttatagccagtgaaactattatagttcgaataaaagatttctcttttaaataaaaatgttagtttaaaaagtcaatttaaagaaaaatgttaactaaacaatactatagatgacaagtagatttgttacataaaatataaagacagttgaatgaattaatttttaaaaactgccctaaactcttaagcgaatgggattattttcaaactgtcattctttgaaacaatgccagtgttaacccaagtagttcccacatgctatcatatttagtaagtcttcctgttttatttttgctaaacaatactgagatatttaggataagcttttagtcctctggatattggtggctcttctcgtgttcttaggacagtgtgctggcagttgaaattgggagtttagtttaacggattacatttctccttcactttctctctcaaactcaagatggcagctcatgccgctctgtttcaaaggccaccatgtgccaccttttgcaagccacccatctcagatgcccgcatcgggaagcacttttagaagtctttgtcggcagccccaagagggagacacagcgtcgtctgaaagtactttataaatatttatgggattgacttgcaaattacagataaaatacctgaaaacatggtaaagagcaaatttgtctggtcccaactgaagaggttttgactcagtagacctcggctagtctctaggaatctgcatatttaacaattatcctgagtgatgctggaccaaacagtgagaatcactgaggtatgatatatgacaataaaggaaagatcttgattgcacacattgctctcaactttggtactgtctgcttttgtaccatgtgtttgtatgttatagtttgacatcacagactgcctgttcataaaccaaatttgagttttccttatcttctaatgaaccaatgtattttcatttgtccttactacttaataaatcaaaagaaaaataagaaatgagaaaaaagtcccctagacttaataccgatgggtcaaaaatggaaatcattaggcatgctgaaattgaagaacctttaacttgcattcagcagcttttggacataagccaggcaaaaactgtgaagaaaatgaacacattttaaaaaatgttagaaatgctgtcattgaagtttgggtctgaaaactgagggatagttaggaaatgtaaaatatctttcttggtgaagatattttttcttgcagtgggcatgatttttgcatacctttagcatgttcagtttctgaacacattcttggggcatgtacaaaagcaagaggttgccaatagtagaatgacagcaagaaacttatttttcacatcctttatttgaagaagcagagtgacgttcattcccactgtaattacagttctcaggtggtggaaatatttcaagggagccaatcgtctcatctgttattcagacataagcaagatgttgataggactctccttgacaaccatagtactgagaatgttcattttcatggctgaatctccacctgaaaaggattttgtgcttgaactcttaccaatggctcttgtaacttgccttcttaaagttactcactctggtcgttaattagactgtgattggatggcaaaaaaaaaaaaaaaaaggactggagaagaatgtagatgacatatgttagattaggctgtaattttaagatcttgctttaatatctgtacatcttactgtctttttaaaaatttaattaaacattctatttcaagataattgtaaattcacattcaattgtaagaaatattacaaaaagatcctataccctctactcagtttctctggtagtaaagtcttccaaaactacagtatgatatcgtaacaaagatattgacattgatattgatgtagtcaagctacagaacagttccattgccacaaggatccctgatgttaacctgttacagccaaatccacatccctgggctccctctctcctccaccaccacattcctaacttcagaccatcgttaatctgttttccgtttctataattttgtgacatcaagaatgctatacaaatgcaatcatgtagtatgtaacattttagatttggctgtttttttcactcagtataattcttacagagatttatccaagttgttgcagatattaatagtcaatttctttttattgctagtagtattccattgtatggaggatgtaccacagttcgtttaatcattcacccacagaaggatttccacattatgaggcttccaggtttcggctattttgaataaagctataaatattcatatacagattttttttttatgtggggataaaagttttcatttctgtgtcataaattcctaagaatgaaacttctggttgtatgatgctggtttcattttttaagaaactaccactgtttttcagagtggctgtaccatgttgcattcccaccaactatgtatgagtcatccaatttttccacatccttgtctgcatttggtggtggtggtattattattatttcagccaatctgataggtgtgtattggtagccattgtggttttaatttgcccttccctcagaggcagtgatattgaacatgttttcatgtgcttcttgaacatctgcgcaccctctccggtgagatgtctgttcatgacttttgcccattttgtcattagattatttgtttgttttactgttgtgatttgagggttctttgcctattctagataccagttctttgtcagatatgtggtttacacatcttttcttccagtctctcacttgtcttttcatcctcttcacagagtttttcacataacggaagttttcattttgatgaggtccagtttttcaaattttccctctgtggattatgcctttgataacaggtctaagaactctctccagactgtgatctcatgcattttctttttatcgttttatttgatatttaagttttatcattttatttaatatttaggtctattttaagctatttttatataaggtgagtgttttaatgtttaagtcgacgatttttccacccccctccatggatgtccaattgcctcagtactgtacactgaaaagtttgcttttcttccactgaattgcttttccacctttgtatctgtgtttttatattgcttgatggatttaataactgtgcaggatgaaaaccaatagaattgactaattatactaatacctctgggtatttaaaaaataacagaatcctctttcatttaatttacaggttttttgttttgttttgtttttttggtagtctctctctgctgcccaggctggagttcagtgacatgttctcggcttactgcagcctctacctcctgggttgaagcaattcatgtgcctcagcctccagagtagctgggactacaggcatgtgccaccactcccagctaatttttatatttttagtagagatggggttttgtcatattggccagactggtctcaaactcctggcctcaaatgattcatccatcttggcctcccaaagtgctgggattacaggcatgagccaccttgcccagccatacagtattaacttttattaaacaaaacaaaaactaacaaacaaaacccaaaatctattctcacgatccagagaaaacgttgttaacatttttttttgtctttttccaatgcatttttagtatagtggagatcatgacctaaatgaaaatttatattctgcttcacccctccccacaataacatattatgaacacttttctatgtccttggaaattccttctgaaacttgtttcaaatgaaccaactatgttatcctgcagacagataatatatgtattatagatgtagtataatttactatataaatattatgtacactatctatattactattttttataaaataattacctatgttatcttacagatgtataacatttattatagatatattctatatgtatcgtaatatgtactacatgtttactatatgtgtaccatttactttatatagctactaatgttgctctatagataagtagatatattacattatatattgtagaagtattataatttactttgtcactccttattgttgaaatttgagtaatccctgacttttttattgtaaataatgctgctaacattttattgtacattcggtgggatcagacacatatcttagcttctttatttagaactaaacttcggagtagagtggatttcgttttttcaccctgaacaaagcagttaatttatgttcaagtttctgagacagaagagaaaaatggaatatataaacattgcagacaagtagtagttaacttgaattcctcacccatctgccaggtactgatagaattataagaggtttttaaattgactatgttttgaaggaccaaatattttatgtagactttgttttgtttcttcttattagctcagaggttcttaaactttgtagtacataaaatttatttataggtcaaatatacaaaaccacatatatatggtaattggaggtaatttaaggatcgaggataatcatgactgaagagcagccacccgtctgcacttgaatatggaattcattttgttttgggttttttcctaaggatagatttctattctttttctttttgagacggagtctcgctctgtcgcccaggctggagtgcagtggcgccatctcggctcactgcaagctccgcctcccgggttcacgccattctcctgcctcagcctcccaagtagctgggacggcaggtgcccgccaccatgcccggctaactttttgtatgtttagtacagacggggtttcaccatgttagccaggatggtctcgatctcctgaccttgtgatccgccggcctcggcctcccaaagtgctgggattacaggcgtgagccaccgcgcccggcctgatttctattctttttaggttatttattgtcaagcgacctttaaagatgaccagtcgagtataatagtgccactcagacatttgccatcagtaactattattattaaattatactcatttgctgggcgcggtggctcacgtctgtaagcccagcactttgggaggccgaggcgggtggatcatgaggtgaggagtttgagtccagcctgaccaacatggtgaaacccggtctctactaaaaaaatacaaaaattagctgggcctagttgtgcttgcctgtaattccagctactcaggagtctgaggcaggagaatcgcttgaacccaggaggcggaggttgcagtgagcggagatcgcaccacctcactccagcctgggtgacagagcaagactctgtctcaaaaaaaaaaaaaaaaaaaattatacttagtaatttttaggtttaaaaatgtctcattttattttgcttttggagaatattgtttttcatatgctcattagctctttgcattttctctctctggcattattaatattttaatgtgctagtgtaccttttactagttattttcttcaggatagttttggttgctagaatcagacccccattcaagctagcttaattaaaagttgcagtgatgttgatggtgatgggttcctggggatatagatgatttccaagaaacccagaggaaaggctagatctcagtattaggaattgaaagattgtgaagaactaaaatgtctcttttacctagagtagaaatgatctagttccctgtagcaggttccacagcttaactctcctgcaagtgattcaacatggccaacaacttctgtttaaacctaccagcattgacctttcaatttggtctgcacctctggtagtaatcttcaagtctctgggttgaatatcctaagcaagaatctggttggtgttaatcagccaattattagctagttagtttagtgtctggtccaactcttcaccatccattatgaggaatatcacgacaaccatgagctgccagattctaggatgggcaatgagatcttcagcatagaccaagcccatggttttcagatttaattgcacttgaaattctagcatgttccttgaatgcctattttatttgtacatttgggatttttatctctgggacttttttctgaaatatacctagtgatattgctatcaaagcatgaagaaatttatcttcaaatacttattttcttttgattccagtaattgtctgaatgacacataatatgcccgttgtggaaacaattttgatttttaaaactttattttcacaaagcaacatcacatttctggcttgcaaatatttcacaggtgaaaacatcaaaaagaaaacatttaaatgcaaatgtcagtcaggggagatgctgagctcagtctttgtatttccttccagatttatcagcgatgctggttagtattcaagaaagcttcaagcaaaggtccaaaaagactggagaaattttctgatgaacgtgctgcatatttcaggtgttatcataaggtaagactcaattgctgtagctttccagtaatctatttacagggaggcaactggaattactgactgaaaacttgcctgaattatttaacaaaggtacaagcaatatcttttccaaggacaaaacacccctaaaataacatctgcttgctaattgtttcaagtaattgactaatgtaaagtcacttttctggtttcctgctatttgctgtagctgttcttgctgttttccagtctctgctatgggacttatcatgttgttgtactccctacactgaagccccgagaggatgaggactggatctcattgtgtctcagacactgcctgatgcagaaagacactcattcaatgcttggggaatgtggggagagaagggaggggaagaagcagaaaacaggtaacagtggacgaagaggaagttctaccgatttattgttttctttaagtttgatgactaaattttcttagtagtagtgagattttctcaataaaaatagtcattgtgtgttacaactcattaaggtaagtacaagatttacttaccacgtggattcacaaattagctaaatatttccctctacatggcagtatatttccgtggtccttgttaacacgcagcctatgtattttcttttttcatgaaaacgtgtgaaagcacatggttaacactcctccgaggctctggttattttcatatggagaaaatactactcttttgtctatgaaggaactatgcttatttttatgatagaacattttaattttggctttccatcttgaagattctttaagcctcatttggtgagaatttactggggccaggcttctttgccatttaaaattttatgcgaaaccagttgatctattagaacagaaacttggctaggtgggggaagtgaacagcttttccttttgtgcaaattctccaaaagtagtgacttttcgacaccttataaagggtctatgatgacactttggtttatatgatgatgaaaacaatggggaagctgcatttcttctcaaattagagaaataaggactacgttatactttataggcacacctgtatgtacataagggaagaataagcacaaaacaagcttttgagacaggtagagaagggagtcaagggtggcgtcttccatgcatttcatttccctgtcaccccatgaagcagttccacattccaaggcttctcccactcccagcctttcttctctccaatggagaacccacttatacctttttgagtccagatttcctctatcatttatctgtcatatgccaaatatgaaatgacactgttcaaatatatatattttttgttctcagggaggagttgttgaattgaaaatgtattatttaggcacagtgatccatgaagccagtgatagcataactctgaactctgcaaataatcttgagccaaactctccacttttataacactctaaactatttgtatccagtcattttgaaccagatgtattatggcccagttatccctcatgtatccagtattttcccttataacaagatggcgagcaatgctataaggatgacttgctttatttttgctagaacagccttttcttaaaagagaatcaaaatacccaggaagatgtttggcttatcatctagacacagacagagctttaggtggccagaaagtatagttacacatcaggtcttctcttgagaaccttagccggtctgtaactttgcaattcaccctgaggctctgtactgtctggtcattgtgtgtggccttttggtccttttttgtcttggtagagttccaaatatgtctggttcttcacaatccaaacatctaattcttcacaattccatatgccaacctttctgaatgtagaaaaaataagaaataggctatgttacagatagacctatacatacctaagagaagaaagaagataaatgaggaatacattataggaactcctcaaatcccatccatcggcaaatggtgttggctgtatgctcaaaatgtatggagactctgaacacagctcacagtctctactgctactactggggtcctaggcagtgggctgccaaattcttgggcttctagagtctgttcgaaacacttatatcacatcacgatattctttgctgcaacaccctcagccaaggtctgataatggtctatgccagtggtccccaacctttttggcaccgggacaggtatcagggaagacaatttttccacagacggggttgggggcaggattggtttcgggatgaaactgttccacttcaaatgattaggcattagattctcataaggagcaggcaacctagatccctagcatgcacagttcacaatagattttacacttctatgagaatcaggaggtggagctcaggcaggaatgcttgctcaccttctgcggtgtagccgggttcctaataggctatagaccagtactggtccagtacccatctgctgcccagggatgagggtccctggtcaatgcgatcacgcgatttgatttcttgctgcccttttaacctcatctctgagtttccttaatcccaccttcctcttctccaggtgccctgggctcctctctttccttggaagatgccaagcacctcctgccctttatacctgctcttcccttttcctggaatgctctcccccaggtacccacagagctcgctcccttactttgttcagtgcgttgctcaaattgctcctctaagagaggccatttcttgactcccttgttggaaatagaacccacctactcactgccttccacatccctcttattgctcttctcaggaggcaccagaacataacacacttgcttggttgtttcctattgtcttcccctcttccccgcataaaatacggtctacaaagacagggattttttggggatgggagacatgattcactattagttaccagaatctaacacatagtgaacacttttaaaagtattggctgaaaagcaagaaatgttatcagtagaggaaatggaatacatacagatgtctatgtgtcatacttttatttagtttaccagaagaaatctgtacttgaggcatctgaaaccagaaaaagaaactttgatttggagaaaatagggtgggcagtgatggaagcagaaaaagccaggatttggatgttttaggaggacagaaaaatataaaaccaaagtggatgaaaaagctcttgcttgaatgtgaaatgaataaagggaagttgaggacaaacttgctctatttcagacttctacctgctggctttggaatttaatatgtaaatctttggggaaattggtaagccacattctctttcacctataataatcattaaccaaagttcaaagcattagaatggaagaattatctacatttagcctccaagcccttgatgaattcctgtagctgattcatcctctactcttttagatctgatacatttagtattaatctctcggggcacataaaaagctggagtaattctgagatatgcatttttcatctaaatgctgtgtaatttatgaatcttgataataaaatactggggttataagtagcacaccgtgaccaaattttagagtttattctaacataaataaagccgtttccaaaagaaatgaggaaatgtacatcatgctatttgatcaatacggaggtggtgtggtggatgcagacatatccctcccataggaaatcttagcctttataagagcacagtacttctcccattttatttttaaagatattattaagaaaaaaatgccagttttgcatatctgactctttttagaagtttcaacacaagaaaaagattgtagaattttaaaatttggtaccccctcactgaaaatgtagctcgaagtacactcctgcaaaaattggaaaataaacatatgaataatgcacatatagaacaatttattttttatttcttacttcctccacgaagcacccctcaagcacccatagctgtcagagatggctgcaaatttgattaactgtaattcccacaatagtaagactccagtgactttaaatatagtttctgaccttgttaaacactagttccatgttttccttcaggaaataatgttgcttatactaattagaaggggatgaaagtttctgtgcatagttttactttttcaagatgagtaacacttgagaggaaatagagtggaaggaagaccattgaccgcttttgagaccaaggcaaatggtatggtgagaagtatgccggtcctggatttaggtagcctgagttctaatcccagctttgccaccgtatatgtctgacaagtcatcctctttctgtgtaaaggtggcctccaaggcaagtcacacatttgcttcctcatcatcacatgtggctgagtctgcagggattcggttcaccttggaccagaaggacaagtccagcaaatcctgtgtttaatgtttcccaaaatgtgaacgaaagagtgtgtcaaaagagcctttcatgattaaatgttgtgtggtcaaagaaattggcaactgcaacgtttatggccccatctttgagattcataacccactgcagcccctcatgggctctgaaaagtcctacagttaagaaattggagggactttgagtcagcatttccaaaacagctgggccatggaactatttgttttaatcgtgtgttccatggaacaaataaatttaattctagggaacacagtctgggatttgctgctttcatgtgttaacttattgttgtttcaacagtaaacaactagggatgatcgtttctactttatctaaatcagggttaatgtgtgtattaaatgaacgtgaatgtatttgaaaagggaacaactctctaactgtagagattaattgccattattatttttattctcccaaacacctttggtcttatttgttctgtcattctaccctttatagtgactaggtcatttgtatctcctaagctcaatgtcagaccttgttcttcgtttctgcaaaaataggattctagcttccgcacaatgagctaatgtcctaaaatttatttctctggaatttcatccaacttatctgtgtgtgtgtgtgataaccttttctgtactaatgattcattctttttttacacagtttcttcctcatctaaaacatttcctcttccgatacagctgtctataatatgtcttttcaaaatcataaaatgtcacagccccctctttcaatactcagatatttactttggagtcatcccctcctcatgtaagaaactacccaccatgccatattctagaagtttcctaagcttatgccaaagaggacatgactcttcacatctccataaattaaatgatggattattactctgatgtttttcccaggtgataaataattccatatccacatttctaaggcttaggtaaattagataaaagaggttgactgtagtacaaaacaccctatttttccaatttaagtacttttttctagtcaaggaagtatgagtcagtaccagagtgccaaagactcctgaaacacgttcaaaactgactgaactctttcctacccaagcttggtttctttctttccttttttcagatggagttttgctcttgttgcccaggctggagcgcaatggcacgatctcggctcactgcaacctctgtctcctgggtccaagtgattcttctgcttcagcctcccaagtagctgggatcacaggcatccaccaccatgcccagctaattttttgtatttttagtagagacggggtttcaccaggttggccaggctggtctcgaactcctgacctcaagtgatccacccaccttggcctcccaaagtgctgggattacaggtgtgagccaccatgcccggcctgagcttggtttctttatgggcttctgtggctcattgtacagcatcaggatccattctgttattcaaggcagaagccagggagttgtctttgacttactctcttccatattccctctcaaatcaatccatcaccaggtttgcatgcagcactcccgctgtatagaccccttttctttcgtggtccatgtggcaaacatttatcaatccctcaaagtctctgctctgtcttcacctccccaagagtcttctcgactttccctgaggtggttcatctgctgggccccctctgcctggatgcactggtcacaatgaaagcagggctttattttcatggtggtggcaggttctgtccatttggggctgatcccttcttctttggtaatggatgtctgatttctagttggagacaaggcaacccatagtaaagacccctgtgcagagagatatgttcctgcaactgattcctggcctcaggggaataagcacagaagacacatacccttcttcgtctcttgttctttcctactgattcgaaaatgggcgtcagccatcttggcccatgatactggaaagctcatggattgagggtagcccagcaacaggtgaagcctggaactgggtgctcagggctggtctgttctccctcacactgtagaaccccagggcaacccaagactacttacctctggatttgttttatatgagaggaataaacttctttcttgtttaagcctttatttatttatttttaagacagagttttgctcttgttgcccaggctggagtgcaatggtgcgatctcggctcaccgcaacctccacctcccaggttcaagcgattctcctgcctcagccttcccaagtagctgggattataggcatgcgccaccaagtccggctaattttgtatttttagtagagatgggggtttctccttgtgggtcagtctggtctcgaactcccgacctcaggtgatccgcccacctcggccttccaaagtgctgggattacaggcgcgagccactgcgcctggccacgtttaagcctttataatgctggattttctcttgtgtgcaccagagtcctagctattagagatgtagtaaaatttcctcatcatccaatgcactctgggtagggaattctgttattcacagccaggagtatcctgacatggtcactgtccgttggatttgaatttcttgaagatagaaaccatgctttattcatctttgtatctatctttccaacatagtgtctcatgcaaagtaggtactttggattctacaggcccttacggttcccaggaaatgattcttggcctacttatactagtattgcatagtagaaatgttagggaaccctggtgtattgagaattaaaagggccatgtgactcacatgccaaattctctgtcatctgagcacatgcatggttttgtcttatggagaagaccttctaataacagagataatgacatcatattttaaattttatttattattattattatttgagacagtgtcttgctttgccatccaggctagagtgcagtggtgctatcttggctcattgcaacctctgcctcctgggcttaagcagtcctcccacctcagcctcctgagttgctggaactacaggcgtgcgccaccatgcccagctgattttttattatttgtagagacagggtcttgctacattgtccatgctggtctcgaactcgtgggctcaagtgattctccctccttggcctcccaaagtgctgggattacaggcacgagccactgtgccaggcctcatttgtacgcatatttacattaaaaaaatcaatctaaaacatacagaaggttaaaaaaaaaatcaaatggtattgaagcgcttatcatgaaaagtagcagtgcctactttattcccacccttctgttgtgggttgaattgtgacctcccaaaaatatatgcctaaggtgtaactgctggtacctgtggatgtgactttatttggaactaggatctttgtaatgtattcaagttgctgtgggattatcggattagagtggaccccagtcccatagctggtacccttataagaagagacacagacccacagggagaaagccatgtgaagacaggcagacactggagtgatacaattaaaagccaaaggtgtcaaggactgcggcagccaccagaccgtaggatagatgcatggaacagactctccctcacagcctccagtaggaaccaaccctgccagcaccttgattttgggctctggcctccagaactgtgacagcatacatttctgttgtgcaagacacctagtactttgttactgcaaccctactctaggaaacgaattcacctcccgaggcttaatcaccattgtcattccctggtgttcattttcctggtggttgcctctgtaactctcaatgatgtgtttataactttgtttcttgttttattaacttccaacattaccaacagattcctcccctttagaaagttaatggtttggctcatttatgtaatctcatcaactctttcttcttccttacaaattgtgacaattacattactttcaataaatattctactgtatgtggaacattcaataacatggttaaacctctgtgcccttccccataaatgttctgatactgagactgattcttatatcagtctcagttgttaacgatcttattgcctgtcccctttgcttttctcttctctatttgtcaggttttttttttttttttttttttactttcatgttattcaataccagattcttgtcttacagcaatgtgggctcgctcttgtcacacgttccattgtttcgagagaaactggaagcaaagatcttttagttgaacactttcaatatttaactgtaattttaaaatataagaaagtataaattgaatatctctccgggtgattggcctgaaagctgcctttaaaattttttttaaatctcttatttaccccttgaactaatgctagaaagagaaagcaatggtattcccaggaggcaacatgtggcactatacttagtaggtctactattttaatatgtgtaaattacaaataaaactatcatcatactttattgcgttggacctagactcctattttctttcagttatttatagtttatatagatacattcattgtgatgaaaacattacaaatacttcagctataataagacttctatggctgggcacggtggctcacgcctgtaatcccagcactttgggaggctgaggtgagcggatcatgaggtcaggagatcaagacaatcctggctaacacggtgaaaccccgtctctactaaaaaaaatacaaaaaacaaaattagctgggcatggtggtgggtgcctgtggtcccagctactcgggaggctgaggcaggagaatggcatgaacctgggacgcggagcttgcagtgagccaagattgcaccactgcattccagcctcggcgacaaagcaagactccgtcaaaaaaaagatttttattagagatacacatatgcttcccaaaatattattttggtcaacaccattgaaaccatcaaggacaaatttgtgtctatgcctcctctgtaagagtaccctaattgtgattggaaagctgaatgttttatatgccagaatgacaggtttcaaagaaaacacaaagaacaaaatcagagagagagaaaaaaaatacatataccatgtagtatgaccatggttgaaacaaggtcaaaggtgatgtcaatcccatgttgtaacatctacgggggcaggagtcacaaacgttggatcagatatcacctgtgagttgcaagtacaaggtagtttcaaagctgtgcctctgcaatatttcttttcttctttttgaggattcccgtcacccttagaattatatcaaagctcattgccaataccctggtctcctaagccctgtatgattctgctccagcacatttctccgacttgccatgccacttgtcactttgctacaatgacctcccttcatttgtcctgtctcaaagcctttgcagtttctgttcctttgttctattgagctctcccccattttttttctcttccttcagggattagctcaatttcactgcctgaaaagggccttatttgaatactccatgcttctcagaatcacatttctttagtactgtactctcactttatgtgtgggggatacattccaagacccccagtggatggctgcaactgtgtatacctctcaaccctatatattctatgttttttcctatccatacatacctatgataaagtttaattcataaattaggcacaataagagattgacaataactaataataaaatagaacaattataacaatatactgtaataaaagttatatgaatgtggcctctctctctcaaaatatctattgtactatactcacctattttcagaccacagctgactgtgggtaacctgaagcctctgaaacagaaactatggacaagaaaaactaccatatattaagtagatagcctttctcactgttgaaattatgttggccaggtgcagtggctcacgcctgtgatctcagtattttgggaggctgaggtgggaggatcacttgagcccaggagtttgagagcagcctgagcagcatagtctcaacatagtctctctaacattgtctcttaagaaaacataatctacatgtatatttgtttactgctagtataccttaagctccaagaaacttattgtgtgcatgttgtcacctgtaggttcttgtatccatcaccacattaagatactgaacatggtcgggcgcagtggctcaggcctgtaatcccggcactttgggaggccgaggcaggcggatcacgaggtcaggagatcatcctggccaacagggtgaaaccatgtctctactaaaaaatacaaaaaaattagccgggcgtggtggtgtgtgcctgtagtcccagctactcagaaggctgaggcaggagaatcacttgaacccgggaggcagaggctgcagtgagtggagatcacgtcactgcactccagcctggtgacagagcgagattccgtctcaaaaaaaaaaaaaaaaccctgaacatttccatcagcaagaggactttttgtgttgccctttcataatcacatcctccagtcctcccaccccaccaccccagcaggcactaatttgtttcccatttctacagttttttttttcttttcaagaatgtttaatcgtttgggattggccttcttcacgcaacataactcccttgggacttatccaagttgctgtgcatagcaatagtccattcccttttactgctaagtagtaatccatagtatacattcccagagtttgcatacattcatccactgacgaacatctgggtcgtttttagtttctcatcattacaaataaaattggtatgaatattcaagttcatgttgaatgaacataagttgtcccccctcctctccatttctgggataaattctgaagaaagtaattgctgggtcatatggtagttgcacgtttagttttgtaaaaagctgtccaactgtgttccagagggactctaccattttacagtcccatgagcagtatatgagtaatccagtttctctgcattctcaccagcatttggcatttggtggtgtcactatttttattttagtcattcttttctttttgagacaggatcttgctctgtcacccaggctggagtgcagtggtatgattagggttcactgcggccttgaaggcctggcctcaagagatcctctcacttcagcctaccaagtagctaggactacaggcatgcaccaccatgcttggctaattttttaatgctttgtagagatgaggtctcactgtgttgcccaggctggacttgaactcctggcctcaagggatcctccctcctcagcctcccgaagcactgggatttattttagtcattctaatagtgacatttcactgtggttttaatttgcattccctggtggctaatgatgttgaacatgcttctgtatatcttctatgaaatgtctctttatgtatttgacctattttctattttttttttactattgagtattgggagtgtgtgcgtttgtgtgtgtgcgtgtatgtgtgtatatatatgtgtcagattgtgctggaaaatatgttctcccagtgcatagatttttctttcaccctcttaacaggatcttttccagaagaaaagtattaattttgatgagacccaatttctgaatttttacctttattgttcatgcttttggtgtaaagtctaagaactccttgcctgaagttcaatcctaaagattttcttgtttttttcttaagaaaaaaggtatagttttaagttttacatttaaatatgattcattttgagtttaatttttgtattaggagtgaaatgtggattgaatttaattcttttccctgtgattgtccaattattccactatcatttgttgaaaaaaattattctttccttattgaattgatttttttacctttgtcaaaaattatttgggcatatttatgtgagtctgttcctagattctctattcttttccattgatctgtatatctgtttctctgccaatatcatactctcttgattactgtagctatatagtaatctttaatattgggtagagtgattcatttcactttattctctttttcaaagttattttagctaatctagtggctgtgcctttccataaaacttaaaaataagcctgtctatatctacagaaaatccttgttgggattttgagagttatgttaagcctatagagcaaattgtgggagaaccgatatcttttctatgttaagtccattcatgaacatggtatgattctccatttgttagaggctttttaaaatttatttcatcagcattttctaatgttcagccttcaaatcctatgtgttttattacatttatacctgattatttcatttaatttgtattaaattttaaggtttttaaaattgagtatctaatttgtataagccagtcatttttggcctatgatatgacaaaacaatcatctagttttctctcctaccccacaattatttaactaatcttagaaatgattaattgtctttgcattttgggaagagcatcaggtttttaacagtttataaaagtttaatttgtttagtctgtcattggactatttgttttttgttagcttagttatattctgaagaaacacacaatacacataatgacataagaaaaacaagacaaaaccaaactttacttatgaagtgaattgattgtagatgtttttcctccattcatgtgtttcttacatgaatttcttaatagcgtatacctctaagatacaatctatccagtttcacatttgtatgcatatgtgcataaacacttaaacataatccaagtacacatataatctctttgtacatgatgccaaaaggaaagggtgggttttctcaagttggtgaaaagtttgtcagatagtttttccgtttgggagaaatcacaggctattattagccaaggcagtcaatgcccaaaaaattctattgacaaaagatggaaatctactaatcggtttacatttttttgcagatttattttttctctttacacttcttattttttaagttattaaaaaaagcatgttttttgtaacaaatataaatgtttctggctgggcgcagtggctcacgcctgtaatcccagcacttttggaggctgaggctggtggatcacgaggtaaggagatcgagaccatcctggctaacatgatgaaaccccgtctctgctaaaaatacaaaaaattagccgggtgtggtggcgggcgcctgtagtcccagctactcgggaggctgaggcaggagaatggcccgtgaacccgggaggcggagcttacagtgagccgagttcacgccactgcactccagcctgggcgacagagcaagactctatctcaaaataaataaataaataaataaacgtttctgaaatgtatggactaaaacgcaaaaaaaaaaaaaaaaaaaaaattctgatgttggaccctagtccctgccgtcagaaaaaaatgctaatagtttaatgtgcatttttcaaactctttactctgtctgcacacacagaaacatattctcacacacatataaattagttttagaggtaaaatggagtaattcattacatattatacatattatatttaagcagttcataaattcaggcttccgtaggacacatttggtgagcctgtggttcttgcgtaaattatagtggcagttcctttcatattcaaaatattgtggttaatgagataaattatatgatcacacgaattgccctagtccccttttcctcatgttttgactataattctaagtcagtaattaatggctctacctccttaatttaacagctctagcgtactgtttaatatcaatacaccataatctgtttaagcatacccaaattggtggacaaaaatgtttccagtttttgctaataccaattctattacagtaaagaatgtgtgcatctatttttatgtgctcagactaatgtttgtggacgaaacagtcttagaagtgaggtatcaggtaatagcctgcacctttaagtttttttctggttactgccaggatgtctctaagaaggttatataaaatcatacacccactgacagcttatgaaagtccccctcatgtcagattccattctctctgtaaatttcagatgcaaacttctcaacttaagcatttttaaaagaatgcacggtgcacaaatggattattttagttatttcacatggacaaataaagagccactcttcaaggagacgtccacatttataactcagacaggcgctagtccctattttaagtgacctagggcatgtagatatttttggaaggaatgaaaccatgtatatggggactggaatataactgtctagactggttctttcttaagaaaattttaataaaagtgtttgcttaaactgctatgttcaagggtcctgggaggagcttggatgaaatgtcttgtggataaaatttttgatgaaaactgagcatgtttctctttgctcgcttctccctgctcactggcactgtatatttaagccattggtatttttttagaaaagataatatgaaaaggttaaaagttttgtaacacattatacaacatcttttggaaatttctaatagaaatgcttattagagtattttagagtactctgccatttaaacataatcgtataaaaataattgttataatttaattgggttatttactaacacttcagaaacattgtggactcagaaatggatggttttcatgttagttttatttttgaagacaacgtacaaaagttaaaggggcttgtgcctctttattttcggtaggataatggtaggataattaaattgttttttaagaatgaaacaatttgaagcttctgcagagctttgcaatttgcatatacaaagtgaattgctcacttaattcattcagtcccacaagggaaaaaataattaggatacaacctacaaagcaaggcggaaaattaccttttatgtagcagtcttgtttttacttggtaaacataaataaatcatcatctgtaaattaccatcagcaaaagaaagggaaaaattggaaatctgatccttttttttttaaatggcttttgactttgcagcatgtcagaaacatagttgatatccccacaaaatgcagattaattgcataattctgacaggaatatgccagttcctgaagggaatgtgcctttaaaaatcccattgtagtaatctttttgaaacagcagaagaaatttcaacagtttcccgtctagttacaaaataatccatttggaaaattgaattgtgtaatttgcaatggttttccaagttgttaatgcaaaactatatcggtagcaaattaaacatttaaagtatgaccactttgttaattgttggctgttaaacatttatttcaatgaatactatcatttatgatgaataagacatctggagtatggctttaaacagaaaaattaatttggcagtccatttttggaaattcttaattggatggcataaagatttatctgtaatttaggagagtgttgagtatttctttcttttgttggaatcacagtactttgtgtatttgatactcagaaagctagaaaccaagaactgcatagtaattaactatttcttaaatatctccctgcttttttattcctctttattcttacctaggtgaaagtcctaattgctttttgctgttttgtctgcctcgctctcaggacctcctctcctgccctcaggtcccattcccatccttctcatggttaaaggtcaacatgtgtggccaagccagctggacaaggctcaaatccaggaggtgccattctgagagattccatttgagtggtgcttcttatagttgtatgaggcagctgccttgttcattgtccacttttactatatataacatcagcactgttgacattttggttgtgagaggctgtcctgtgcgttgtaggacctttggcagcatccttggccttgaccaaccagatgccagtacatcttctcaattctgacagccaaaaatatcttcagacattgccaagtatctctggggaaggggggtgggcaaaatcttccccagactgaggaccactggcctgtggaatcatctttctagagcataaatatgactgttccatttgcctgcttaagccttttaatttgcactcttcagatcttatgattcaccctaaactcctgagtgcagcgtaccagcccctttaggatctagctctggtccgtctgctccagcctcatgctcatcagtttcctgttgccaacttcctcccatcactcttccctacgttttcatcataccaaactctgttgtcttatgattgcacacgtgtagtttcttttgcctggaagctcatctttgttttctttgcctcataaacccgtgctcatccttcgagacccatgttaggactaacgaggcctaactcagaaatgatggcctctctgacctttttctctatattcatttggtggtttagtaaagagttgttcaattttctgtgtttgaattactgtctcagttattcaccgtctgtatgaacaaattaacctctttatgttgcaacattcttttttttttttttgagacggagtctcgctctgttgcccaggctggagtgcagtggcgcgatcttggctcactgcaagctctgcctcccaggttcatgccattctcctgcctcagcctcccgtgtagctgggactacaggtactcgccaccacgcccggctaattttttgtatttctttagtagagacagggtttcaccatgttagccaggatggtctcgatctcctgacctcgtgatcagcccacctcggcctctcaaagtgctgggattacaggcgtgagccaccgcatccggccgcaacattcttatatgtacaatgggaatacaatagtgccagccagttagattggaaaaaaaattaaatgacatgattgatatgaggtgttcagaacgtaatacctagcatataattaagaaaaaaattaatgtcagccactgccgctattattgttattatgctatcataatatcttttttttaaggttctacaaatggcccacaagcaacgcaggcagcccccttttttttgtaggtcttgggacctttgggaaccatatagatcagattattagatctttccctttgtatgcttctgttgcacttgtgcagacttggtctaaataatcattctctggagttcgcctgcctctgccactagttgggaatggtccaaccatggatgtgttaatgacatcactgtgcctctcagccttcttgcttttacagtgtggatgatgccaatattcacctctggaagtagaactttaacaagcacctactgagggtctaccctgtataaagcatggtttttggcaatgtggatttggtggcaaacacagcagacgaaatcctgaccctactgcagtggggaatagagggaggcagaaaggaatatatataagcaaaatatgtagagtattggtgttactgataaatgccaaagagaaaattaaagcaggaatagaggataggaagtatggaaggagagggttgcagttttaagcagaataatcaggaatggtctcattgagagggtaatatgcaagtcactgatggtagggtgagagtgagccaatggcgtagctagaggaagtgtttccaggcaaaagaagagcaagtgcaaagcccggagcagggagaatgcttgttgggagtgacagaaaaagaccacataaatgaaatggatttcagttgggctttaaagataaaataaagctgggcttttaagataataaagttaggcgaggcgcggtggctcatgcctgtaatcccagcactttgggaggccgaggcaggcagatcatgaggtcaagagatcaagaccatcctggctaatatggtgaaaccccatctctactaaaaatacaaaaaattagctgggtgtggtggcacatgcgtgtattcccagctacttgggaggctgaggcaggagaatcgcttgaatctgggaggcagaggttgcggtgagccaagattgcaccactgtactccagcctgggttatagagggagactccatctcaaaaaaaaaaaaaaaaaaaaaaaggataataacgttggttgtgcgttgacttcatttcagtagagtgtcttccacgtaatgacctctagcatcacaataaggccatgtttgcagagaggtatataggagcttcctgaaagttccaaagagctgcccactagataagcagaacttcagtgtgcagctttaattcttccaactatgcaaacagagccatttcttttagaggaactcagagcgtgtgggaagaacacatgcagttggaatatatcctgagaagagagaatcaaagtttgttcagactgatttttcaggcagtgccatccaacataatcacatgctggagccaaaaagcacatcactgacaaagtagccttctgtcatttcctgcattgctccaggaaaggcgagccggaccgccttccccatctgctgcaagtctctgttgaaggaaggacgctgtgctgcctggggaggttttgaaggcccagctaatgatggaatgcaaatgccgccaaaaggcctgagaagcagagcatcacccatatcccttctcaataggactagatagacacctgtatccacctctgcttggttttcttcatatccttaataagtacagtttgaacttgtggttgtgataacagccagctggctatttctgctgagatacccatgaagagactgacgatgatgtgacattttaatgccactgttcctttcttgaggaagctacctgagtgtgtatagcagctcacctattgacacatctgagttaaaagctgaggatgaggatgtctgtgtgtacaaggactatgtggtgggcactgatgtgagctaaacaggcagagtaaattctaaagagttgaacttgctcatatgactaaattcagtagttacacatttttgaaattaaattgaatagcaatagtgactctagtaataatctggatctctgcagattatattagtgaaaagcattgtggagtagaaacaggaaaaatgtcctcagtcaatgtttatcttgaacctggcaatcatagacatgtgggcttaggaggacaaattgggggattaaaaaaatagtattttgatgcagaggaaagccttagatgaatgctaagactgtttgctgaaatggttgggaaacagtatagtcaggtgatgccaaaacatcacctggctctaatgacaattaggaaaattgctattttactataaacagaaatggcagctacctccaagtgatcaagctgagcctcattcatggagggattttctggcattctttgccttatgaagcgatgccatgtgaagtcctcaacatcacttataaagcattcttaacaaaaatgtttatctgaatctcatcaaacttttaaatgtaacttccattttagaagaagcacagggaatagaaaaattaagggcactgtggaaaaacagacagatctagaacacggaacattctgcaagaaaactaacacgatcttttcaacaggcaggaatcatttacaaaatatggacttttctaaattaaagagactcagagttacaaagaaactcaaggcatgaatcctcatgggattctggattggagtgatggtggacaggcatgggcacacacacctttagaaaacattttggggactttcagggaactttggatatgggatggaagttaagtatatgaggaactattgcctattttcttagttgtgtaaatggctttgaagtgatgtgagacaaccctgttattttatttcatttttgagacagagtctcgctctgtcacccaggctggagtgcagtggtgccatctcagctcactgcaacctccacttcccaggttcaagtgattatcctgcctcagcctcctgagtagctgggacaacaggcacccgccaccatgcctagctaatttttgtatttttagtagaggtggggtttcaccatgttggccaggctggtctcagactcctgacctcaaatgatccacccaccttggcctcccaaggtgctgggattacaggccaactgtgttatttgtaagaaatatttgctggagttgtacagataaactatataatttactttcaaatcatttaaccaaaagcaagtgtgtgcacgtgtgtgaacatgcacatgcatgtgaacactcattacatttatatataaagagaggataaatccaaaaataaaagtagcgaatcttaataattgttcatcctaagtagaggatacattagtgtttgttgcatcattcttttagtttttccatatttgaaaatcttaaaaataaaattttggaaaagaaaatcatgaacacagagttcctggagaaacgatcagaggcagaaaacaaagaataccttttaaaaaaatgaagcatgaaaagaattagaaagaataaaagaggactgaaaatattcccaaaatgtcagtcataataattagtttaaattgatttaacatctatatcaaaagacgatgccttagattggataaaagtataataatccaacttcgtatttcttaaaatcagttatatgtttctataagagatacatataagatgaaagcaaataaaaatttaaaataaattttaaataaataaaatggtcattcacatagaagactactgctcagaagccaaaacttcttatatcttcaactgcaaagatgaatctcacagacatgatattggacgaatgaatccagacacacacacaaaaatatgatattctatttatataaaaagtttttaaaagaaggaataatcaatggtgatagaggtcagaatggtagttttatatgtgggccataatgaccaggaaggggtggaattgactgaaattctttttatatgttcctctatatggttaccacacagttgtgtaacgagtgaagattcactgaactgcggtcttgagatttctgttctttactatatgtgctttgccacaggacctggcatgccgattcctatgctgtgtgtcttaaatttcatttgagtggcagcctgcgtgggctttaaaccatggtgccatatgtacccacataaaaccaagtggttttgagaagctgagttttctttcacatcttaaagtccaagtaggaaagatgagtttagttcaggctgccttcttttgaattgacaagtactttatttttacttagaaattaagatttgcattcgttttttcgcatttccaagtggtgtacttttaaagatgcagtttatgattttcagaaatattctttaacatatttgtctctaagaccatttgcatctttaattttattcatttgctcatttactgagcctgtcagggattcattcatatgttattatttgatttttaaggaacacttgctgtggagagtagtattaggaaaaacatacttgttttagaagctggaagttctagatttgagtatggctccatcccctcctttctatgaaattataattaagttacttctttgattttcactttattgatccttgtaatgggtttaataatagtttaccaaggatgttatatcatccagagaatttagtatcactttaaaatcattcagtattctgtgtttgattaaagtgaataggcttctttcttgagaagtagatttataattgttactattgggaagaggattcgagtggaattcatttctttatttccttatactagctccgcatccatataatgggtcagtgtgttagatttcctttgaaaattaaaaagaaaaaatgattcaactgctaaaataaaactgatagccaatgttctagtacagtttcctgattattaggaatttggctaggaaatctggtcttcatacaagaagcaatattgttacacaatgggatttgagagaaaactctatgaaaatccttggccaaaaggaaatcaaacagagggtgtattagccaatgtctgctgtggcaataattccaaaatcttaacagtttacagcaacacatctttatctctcactcttgttacatgaggggtctggattgattggctgtgagtgtactgaatgcatctcaactcagctgaggttcacctgtgttcagaaatccaggaaggagggcaatgttgttctcatggtggagagttgaagctcaaggagggagggactgacctaattacatgcacttaaagcacattaactcacactgtattggccaaagcaagttgcatggccaagtccaaagtcataggaaacagttgcaagggctgagagggaatgaatgattcttgatagataactcaatctaggacaaaaaatgaaggttgctgtgagctgcagaatgtgcctttggtttgatttacatatccccaaatcctagggagagaatcatttttgccaaactttatctttactgaatcttttccaacctccaggatcacaagtatacttcatgcattaaaaaccttcccaaagttcattatcttttaccactatgtgctgtgaattctgaggtagcctatgataatttctgtaagaaattacttcaggatgtcaaaaatcagattaaatatagaattaagctgggattttgaaatttaatacccatttttttgagaaaatcaagtatttcaaaggtcctaatactgacatttttagtaagccgtatagacacttccggtcttctttgatagctacaaattttagctccatttcaagagaaagaactctggaacctaagcctaaatatatcctgaaaaaagaaaagaaagttgaggaattgagaagagtcaaatgattaatttgaaggagtaaccaggcaggtaacagcccagaaaatacacagaagttattttgattttctaacttggcctgctgttgttttggcagaaagatcgtgtgcaaggatatctaaaaataaataactctatttacataccatttttaataataaaatttgacttctcttcttttctgttatcaaaactctttctgttagtaatgaaaatttataattgcatctcctttagaaaatttataattgtgtctcctgtttcgttgcaacagctattttgtcctttaaatcataattctcagacatatttcaggtttcagtcatggagcttgaaatgctttattttctttgttgcttgcggaatacaatcatgaaatgggcaaaaaagcacaaggaaaacaaatggccctattgagatgagtggtctttaagatatcaaatgggaatcagatcatcacccagtttctgttaaaatctattgtcattcctctgctaagcaaatgagacttgttctgggtgattatatgacattattgtttgtatgctgtactgttgactcagtaggaaattatatgaagaaaagtcaatttcatagcagtagtattagattaacagtatctttcctgacttttaggcatttgtcatttatttattattttttgccataatcagtatcatctttactcttacgaatattttgttttaaatcaggttggtttttgtttaaataaatttacaataagagaaaacttttcttattaccatattaccattaatacaagaacagtatcacttgccatgaatagaaattaacttaataaaaaaatacaatggatagaaaataatattttaaaattctgagtatcttttgctgcctaaaagttgtgtgtgtgcttgtgtgtgtgtgtgtgttggcagggggtgaggcacagtggttaaagaacacataacataagacttacccacttaacaaactcttaagtgtacagtgcagtattgttaattacatgtacattgttttatagcagatctctagggcttttttaaatcacgtgtgactagaattctatattcgttaaacagcaacctcccattcccctctccctgcagtccctggaaaccaccatcctattttctgtttctatgagttcagctactttagataacctcatataagtggtaaccatgcagtatttgtcctttcgtgattgtcttcacatagcataatgttttcaaggttcatccgtgttggagcatatgacagaatttccttcttttttagggtgggataatagtatatggtatatgtatacattttctttttttatatatatatactttaagttctggggtacatgtgcagaatgtgcagttttgttacatagtatacacgtggtgtggtggttggctgcacccatcaacctgtcacctaccttaggtatttctcctaatgctatccctcccctagccctccatcccccgacaggccctggtgtgtgatgttcccctccctgtgtccatgtgttagccttgttcacctcccacttaggagtgagaacatgcggtgtttggttttctttcttgtgacagtttgctgagaataatggtttccagcttcatccatgtcccttcaaaagacatgaactcatccttttttatggctgcataatattgcatggtgtatatgttccacacacaactttacaagaaaaaaacaagcaaccccatcaaaaagtgggcaaagaatatgaagagacaccacattttctttatccatttatctgtcaatggataattaggttatttccctgttttgactattgtaaataatgctgccataaacatggaagtgaaaagatctcttcaagaccttgttttcaatttttttgaataaatactcagaagtaggattactgaatcatatagtagttctgtttctaattttttgaggaacctccacactctttccctaagtggctgcacctttttacattcccatcgagagcacacaaagtttccaatgtctccacatccttgctaacacttgttatcttttaggtctgtggggttgtttttttctgataatagccatcctaagagataggaggatgtggttatggttttcatttgcctttttctgatgattagtgatgttgagaatcttctgatatatccattggtcagtgtatgtcttctgtggagaaatgtctatctttgaatagacatttgcccattttaaaattggcttatttatttttacttttattatttttgctattgagttatacgaatttcttatatattttggctattaaccctttatcaaggatatggtttgcagatatttttctcatgctataggttgccttttcactctgttgattgtttcttttctatgtataaactttttagtttgatgtagtcctacttgtctatttttgctttcattgcctgtgtttttggtctcatatccaagaaatcactgtcaagaccactgtcataaagccttttccctctgttttattctaggagttttatagtttcaggtcttacatttaagtctctaatccattttgaattgattttttgtttatggtgaagtaagggtacaatttcattatttttcatatggatatacagattttgtagcatcatttgttgaaaagcctatcattttcctgttgtataaacttggcacccttgtgaaagaccattttattgtataagcatcaatttatttccaggttctctttctgttccatgtgtctgtatgtttgcctatgtgccagtaccatattatttagattattgtagctttgtagtatattttgaagcaactctggctttgttcttttatgttgattgttttgactatataaggttctttgtgttttcatatgaattttagctttgcttttcctatttctgaaaaaaaaaaaagctcctgggattttgatagagattacattgaatctgtagatcattttagattgtatgttaagtcttttttttaacaatgttaattttaacaatgttaagtctttcaatctatgaaaacaggatgcctttcaatttatctgtgtcttttaaaatgaatttcttcagtgttttctagttttcagtgtacaaatatttcatccacttggttatatttattcctaaatattttgggttttttgatgcaatagtaagtgagataattttcttaattttcttttgggattgtttattgttagtgtatagaaatacaactgattttttatgttgattttgtatcgtgccattttactgaatttgtttatttgttctaactttttttgtgtgtagatagaatctttagggttttctacatataaaattatgtcatcaacaaatggagataattttacttcttctcttcagatattgatgccttttacttctctttcttgtctaattgctctagctaggaattctattaccttgttgaataaatgtggtgatagttggcaccttttgacttgctcctgatcttaggaaaaaaaaatgttttcatttttcaccattgagtatatggtcttcatcatgttgaagtaatttttttctactcccattttgttgagtgtttttatcatgaaatgtattgaaatttgtcaaatgccttttctgcatctgttgaggtgatgatatacttttcatcctttcttctgttaatgtggtgtatccatcttgctatgtagaacccttgtatctgagagataaaccccactagatcatgatatattatccatttaatatgctgctgaattcagtttgctagtattttattgagaaatttgcatgtatattcatcagtgatattggccagtatttttcttttcttgtagtgtctatatctggctttggtatcacagtaatgttggtctcacagaatgaatttggaagcgttccttcctcttcagtttttttgaagaggttgagaagaatttgcattaattcttctttaaatgttttgtggaatacaccaacatttcttccaacaaagaaatacacaaaaagccatctgatcatgtgtatttctttgttggaagatttatgattaattattgaatcccttaatagttacaggtttgttccaagtttctatttcttcatgattcagtctacgtaggttgtatgtttccagaaatttatctacctcttctaggttatccaagctgttgactttttcttggtgtatcatcattcatggtagtctcataatccttttcatttctgtggcatcagaagtagtatctcctttcatttctgattagactccacttattttccttaacctagctatttgtcagtttcattgatctttcaaaaaccaattcttggtttcactggtttttcctagtgcttttctattctccatttcatttagttctaatctaatttttattatttcctttcttcttattattttgggcatagtttgctctgtttctagttccttggggtgtaaatttaggttgtttacttgaggtatctcttcttttttaatgtaggaatttaccattataatcttcttttttagtattgcttttgctacctcacacaaatttcggtatgctgtgtatttgttttcattcagctcagggtattttccaaattcccttttgattccttctttgatctattggttgtttaagattgtgctgtttaatttccacatactgtgattttttttcagttttccttctgttattgttttttagttttattccgtggtggttgggaaagatacttaattctgttattattttttagttttattctattgtggtaaggaaagatacttcaatttgtcaagacttgttttgttacctaacacatgatctatcctatgtgcacttaataagaaagtgtattctgctgctattgactgtatttgtccgttaagtttaattggtcttcagtgttgttcaagcactctgttttctttcttatataatctttggatgtcctatccattattgaaagtggggtattgaaatctcctactattattgtgttgctttctctttctctcttcaattctatcaatcaatgtttacttcatatatttggttgctctggtatgggatacatatatattataattgctatatcttactagttaattcatctttttttcattatagtgtccttctttgtctctcatgatagtttttgacttaaagcctatttaatctgatataagtattgccacccctactcttcttttgactgctgtttctatgggttatctttttccattttttcactctcagcctatgtgtgtccttaaatctaaagtgagtctcttgtagacagcatatcgttggacctggtttttaatttatcttttgatagggcagtttaagctatctccatttaaagtaattactgcaccaggcatagtggctcatacctgtaatcctagcactttgggaggctgaggcgagtggatcacttgaggtcccaacatggcaaaaccttgtctctactaaaaatacaaaaaaaaaaaaaaattagtcgagcacggtggtgcacacctatagtctcagctgctcagaaggctgaggcaggagaattgcttgaacccaggaggcagaggttagctgagatcacaccactgtgcacaagcctgggtgacagagtgagcctctgtttaaaaaataataataaataaataataaaaataaataaatattgataggaaatgattacttttatcattttattgttttctgtatttcttgtagctcttttgtccttatctttttctcttgctgtcgtatttgtgatttaaaaaattctttagggtcatattttgattccttcctcattttcttttgtgtgtctcttataggtatttcttttctggttgctgtggggcttatataacacattttatagttatgatcatctattttaagatgataacaacttgacttcaatcacatacaaaagctgaactattccaccagactcctttatgttatcattgtaacaaatttcatctttttattatgtatccattaacataattttatagtttttatacttttatctttttacttctatatcaaaattaaaagctgtttatacaatattcgtaacattacatgtaatgtaatgttatagtactataatatgtatttgtgtgtttgtatatatgtatatatactataatatatatttgtatgtgtgtgtatatatatatagtactataatatgtactcgtgtgtgtgtgtatatatatatacactataatatgtgtgtgtgtatatatatctagatatacacacacacacacacacacacaccttttccagtaaattatatattttcatttgctttcatgttactatctggtgtcctttcatttcaacttgaagaacttcctttagcatttcttataaggcagatttctttgtaagaggactattatgtcttgccttggttttctcatttgcaaaatagaatgatagtggaaataaatacatctttgaaaagttttatgtgacttgtaaatatctctgcaaaatttagttatcataagtattactttactttattactaaattactaaattattactatactttagcatgtgtattgaggaagtttccattatcacattatgaattagtgtagattgcaaggcttgtgtgtgttgtgtatgtgtgtgtgttgtgtgtgtgtgtgcacatgcccactaggtgtagttctgaggtagagacagagaccgttgctttaaaatttgattgtcctttgacccataaaattatgaccctggctgctctgggaatggtcatttgcttctcctgagcgggggtgttcagttgctgatttcctaaaccaatttcctaaatgggtaattgtgttctgactcatacaattccccctacatttcctgactatttcaggtgactatctcttcctctttgcccttaatggataggtaatgaagtcacatgtttcaaagtcattgctgtgtttcaggctggggtggactactcttacataatgtctcactagagagtcagaataaagttggcacacgtgctctacctccacctcaatttttaaccatgttgaaaagaaagaagtcttaaaatgagaggtggctttcaggggctaaagagcctctggttgaaagtgtttagttagtcattagtgtttcagatgcattaaaagcacaggctttagggttagtttgcttcattttttaagctgtgaacttggttgtatgactttaacctttcgcagtctagtttcctcatctgtgaaaaaggtgataatagtaatatttatttcacagagcttttatgaagatcaaatgagatagtctctataaaaatgctggccgggtgcagtggctcacgcctataatcccagcactttgggaggctgaggcgggcagatcacctgaggtcaggagtttgagaccagcctggccaaaatggtgaaaccctgtctctactaaaaatacaaaaaaattagctgagtgtggtggtgggcgcctgtaattccagctactcgggaggctgaagcaggagaatcgcttgaacctgggaggtggaggttgcagtgagctgagatcagcgtgggcaacagagaaagactccatctcaaacaacaacaataaactaggcacgttatgtggcatatgtgtggggaccaatgcatgttggcatcagtatgattgttttcattgattcagcccttcagtaagtcattgctggcaactcaagtctagctgggtgctgcagagagacaacaaataatacagtagagcttcatgcagcatttatgagaatagagagaagagaaatgttagttgacactaaggccagggcacatttcctagaggaagtggaccttgggggaaaagtgaaatttccctggagaaaagaagcaggaaagagaggcatttgccttctagaagcaccatacaagtaaatttatgggtgagttgggtctttcattcatatagtccacttataattattgagttctcaatatgtgaggggttctgtgtttgactcagggagcacaatgatgagcagagcaaaaacaaaacaaaacaaaaactattcctgccctatgtaactctcacttttcaggcaagatgggtgtgaaaccaataacaaataggaaaggtataggacatcattggatggtgtagccttgagactgactaggtgttaggatgggaggtgtccagtggggcctctgtgggtaactgagatttaaactgagacccatgtgggaatgggagtgaggtaaggagagatagagaaggccctgtgccaggagaaccacagtgtcttctgggaactgaacaaagtccacggtggctgagacatagagcacatgggaaaggtatagagaggacagtggtgagatagcgtgggcaagaccacagggggtcttggtggtcattctaaggatgcaggcttttgtcccacgtgcaatgggaagtcactgaagtgttctgtttatgcacagtaatatttcaagacttatgttttgaaaaaaaaatctgctatgtgcagcatgcattaatggggattaaaatggaagtggaaagatcaataagtagttgtgacaagatgatagtggcttgaattggggtagtggcaaaaaataaaaataaacaaacacatcaacagttgtatctggtgagtcctgaggcacttggtgtagttggagaataagatacatggtgctgagtcactgacgtgatcggtttgggcactttttgaggagaagtggtgtgacatttcatgctaagaaatttgcatttatactatgaaaagggctgatggagattaagaagcagagaaatgaaataatcagattagtgttgtgcatggaggatatttatttcacttcccacctactgcttgagctaagcatttattgaatttagagtaacagacgagagaaacggaacaacatcattgcaggcaaagattgatggaaagtggattcttttgtataacagcacaaaagagatatatgaaagggaggttaaacttgtcagtgtgaaaagctattgatcttgtaaatacttaccctgaagccacctaaggcttcgctcaggcatgacccaaatattccaaacctccaatgcagctgaggatgcggatgtaactggatgagagatgaccactgtggaaatataatgagccaagacactttgtgggaagggaggggtttacaaaagtgttaaaggagccaaggaattatgggagagagggaggagagagagaacgtctagtggggatggctttcctccctgctaggaagaaggcgccactgggtagtgttctcagagcctaaaacagaggccctgtaaccactgaggagctaggagtaagttagagacagtgggaaaatatttggaaaaccaaattcattatgtactttctatgatttggacctcaagtcaggggtcgtttctgagactcttgacgctgtatctctgactggtaaagagtgaaataatctagttatgaattggaccactcttccttcccttcccttccttgggttgatgtatttaagacacttacatggggaatactctgaagggatggaatatttggaggcttttgcagccagctgagaaagaaggctgtccacagagaccgaaacagacataagaactattggtcaagtggagtctttgggaggatttgaaaaactaaagaaaaaagaaaaaccaaaatgttctacctctgtgaagttttaagcttgttccacttaatacgtttcagaaaatttaataaggaaagataatttgttaaccatccttgcggtgtgttacagataatactaaactcacttaaatacatcttagctttcagatgtagatactttttcaacaggttgtgctcagctgtgctgtgccatactgatttccgggcctcacctttggtgttgtatactggagacattcattcagggagtgtgtcaaacttctaattgttcattttcaggttacagaactcaataatgtgaagaacgtagctcgattgccaaaaagcaccaagaaacatgccatagggatttatttcaatgacgatacctccaagacttttgcttgcgaatcaggtttgtctcaggcagggctggggggcttttgcttttagattctgaatggatgctgggcacacagtttaatctttttgacatttccacagatcttgaggctgatgagtggtgcaaagtactccagatggagtgtgtaggaacacggatcaatgacatcagccttggagagcctgacttactggccactggggttgagagagaacagagtggtatgtaaagaaaattctctcctctctctttcaaaactgcttctgtctccatatgataaaacataagacatcttcattatgtaaagtttttggggtataaaaatgtataaagaaataagtaatcttttatctaatccacaacctgtgttaacatttcagtgtatttttttcttattctttttccaattcataacatgaatgtatctacattaataatatcagttagaaattttggggaacctgctatgtgccagtttggtggaagatgcttaactcatctcagattatttattgtacttttcatagcagccctatggtgtaggtataattacttcctacgttttgcagatgaggaaactaaaatttagaggacgtaaagactttccttcaattctgttagctcactagtgtttgattctagacgataccgttggacctatattacagtttacagattttaaaatgtcatgggcattttttggtcatgcctttttcacttaaaatgttatcaacaactttccaatgttttcaatataattcaaactttatgactatttcaccaaatttaaacccatctaaaatctgtaattaaaaaaatacatattttattgaaacacttgagccaactctgagctcagcagtcaatctgggaatcaataatttaaaataataatgactaaaatattcatgaacacttcagcaaaaatcagtgttgatttacagaacaaacctggatgtgaggaatcattcctttgtctcctaacagctgagcctggggacggggtagatcagatcacagagttctgctgtaggctgacttgatctatgagggcatgtcaccatggaaaggtctgtgggtcatctggtttgattacggacatggcagagatggaattgtactgactttttctgtaggtgcacactccaatgttagtaaaaaaaatgctgtccctcccaattggaactatgtcttcatgacacatttacaatctgtgactctttggatgcaccatatctgccataacccatctccatggaaatgttattgaccgagacctagaagccctgggtaattcagaggagcctctttgtagattggaaaattgagctacagagaggttaagtcattgacggggttacacaaccaatccccaggctcctccttctctggttcactaaatcaggacaccccaggcagagaggatacctaggagccaagcataaagaaaacctggcaggttttgattatgattcattttttcacctagagtgctcagatcagcacttttcacaaatttgtatttggggaagcagtatcctgacagcaccacaatctgaatttaaaaattggcggtgcgtaggagatacctttcccacagcagctttctgtgcctcagtttcctcttctgttaaatggaaataatagctctggtctacaagtatcagggattattataaattcaactgtgtcctctcaggccctttccaatgttaattagtatgacttcaaatgattgtaattaaaatggtcactccaccattattgctattactctttttaaatttttattattattttttccctatctctcccctattgttattcttgagtgaggtaggactcagagaacttctaagcaaatagattgataatgatctctcttactttttacttaatatagacagtctttcttacttggaactttcaaggggggggaatatgctcaattagaatacatttttaaatatgattactagaaatcaacaaatatttgtttattgagaatatgaaataattaaaaatttttgaatagtagatcgcggaacacatttcatgaacactatctcagcattactatttactaaattcaactaaaatctatgaaaattcaaatgactatcttatcataaaacaatgtatttagaataccactaatataaaattgttaatgccacattgtcgtatgtaggcaatctaccataatgatgcataggtggaaatatgtttgctatagtaatatttttgttcatttttcactgaaagactttgactcaaaaacttcttaatgaattttccagaaatataacagaaatatggtgactgtatctgcagggatgaaaattaggttaatcagccaagcagtttatgtagaataattttggttgcattttagcaatcatccaaatatgcaatgaatatttctttccactatttggctaaaggaagttctttgttgaaactagttcaaatatatgcattggcattttcccaaattgttggccagttaagtgcatagtattactgtggcattttgtttaaatgattgaaatacagttttattcatttagttatagaaattacaagttgatcaatataactttaataacatggaaccatgacataattgttttgcacctgcatcttttgtgagcacaaaagtgtggatctagttaatgtgttcttggcaggaaaaaaaaattgcttttaatggttgtattgctttagtcttttattggcatatacatttttattatgcaaatttaaaaattctaaaaatggtcttcgctcatgtaaatagtgcttagtgtatgttgacaggctgtatcattattatgttatttaataggatctgcatttaagaaattattttctgggactgttaattaataggaaaggtttatctttctgaatatgcaaccgaaatctagaatgtgaacttgaattgtttttaaatgcctctatgttcctacaatgtctttgatgttttattcctggggattttagactaaccttttgtttttctcccagagagattcaatgtgtatttgatgccatctcctaacttagatgtacatggcgaatgtgccttgcagattacatatgagtatatctgtctttgggacgtccagaatcccagagtcaaactcatctcttggccgctaagcgccctgcggcggtatggacgtgatactacgtggttcacttttgaggcagggaggtgagtttaatgacttttaatgactatttttctgtttgtgtgtgtgtgtgttcatttttaccatgctcgcatcatatgaggcggtaggtttacatatgagatccagctgaagtacacttgaggaaattcatagagttgcgattacataatatgaggggtcttgtgaaatatttatatactcaacatggcttttctcccctgtggaagattttaatgtttcacacacatggtacaaattttcattacacagtttgattccatatcacaaactgaagttgatccaggtaaaaatgttaaaaaggtaccatttcctgggtcaagctgaacagaggccagcttcttgattttggaaaacttccatattattatttcacatatgtttcctcatctgagctaactgtggtagattattaatatgagggcccatggagtttttaccagctgcaatttcttgagttccatctatttggcttacagtgtaaggattctcatgaatactgaaagagattaatgctaaaacttgctctttgtgataccgactaagcactttccgggttttctctttttcctcttaggggttaatctgggagagattaaccagatagtatagtaaccaagccagtagtatatggattggttgctacctacaaaaagattcctctagccataatcctattttccttgtccttcagttttccctcagaatttaggcttcgtttgggaacactgcaggtaattttttttttttttttgagatggagtctcgctctgtcacccaggctggagtgtaggtggcacagtctcggctcactgcaagctccgcctcccgggttcacgccattctcctgcctcagcctcctgagtagctgggactacaggtgcccgccaccacgcctcgctaatttttttgtattttcagtagagatggggtttcaccgtgttagccaggatggtctcgatctcctgacctcgcgcttcggccttccaaagtgctgggattaccggcgtgagccaccacgcccggccagataaattttctattttagaattttaaatgcctaaattttaagaaatataagttcttctgtatatggcctgacattacactcaaattgaaaaccattaacttgtgatgttaaataaaaattgcttgtaaaagcagacagttattcctgacaggaatatgactcttgatataaggaaagtaaaaactgaagttctaaataccccaatccatgtgaatggataacagtagtggtcccctctaactaatctgttaattccattttaatgaacaaagcccaattatttaaaatttacattttacctgtagtcccagctactcagatggctgaggcaggagaatggcgtgaacctgggagatggagcttgcagtgggctgagatcacccactgcactccagcctgggtgacagagcgagactctgtctcccagaaaaaaaaaaaaattacattttaaataatcaaagcccaattatttaaaatttacatttcagaaatatgatcactttgatgttcttacaactgtctgcaaagttttttactttatacttttcatacagttcttttctggtctattttatttttaagtacctagaaacaagttggtgaatctttcaaagactataaaagttatcacaaaaaataaacctttaatgttgagagcaatgttcttattttgtgagaattacttatttattcttcttataagaaaatcccaggccaggacggtggcttatgcctgtaatccaagcacttcgggaggccaacacaggaggattgcttgagcccaggaatttgagagcaggctgggaaacacagggagaccccatctctccaaaatgtttctgttataaaaacacatgcacatgtatgttcatcaaagcactattcacaataacaaagacatggaatcaacccaaatgctcatcgatgatagactggataaagaaaatgtagtacatatataccatggaacactatgcagccataaaaaagaatgaatcacgtcctttgcagggacatggatggagctggaggcctaattccttagcaaaccaatataggaacagaaaactaaatactgcatgttctcacttataagtgggagttaaatcatgagaacatatggatacatagaagggaacaacacatatggggcctatctgagggtggaggatggggaagggagaggatcaggaaaaataaataatggatactaagcttaatacctgcatgatgaaacaatctgtacaataagtcaccacgacacaaatttacctatgtaacaaacctgtacatcctgcacaggtacccatgaacttaaaacaaaagttttttaaaaaagaaaataagaatacctattcatcattgggtatattgtacaaaaaataaaagcaaattaaatgaaaaaaaaattagccaggcatagtggcacacacctgtggtctcagctactccagagactgaggtgggaggatcacttgagcctgggaggtcgaggctacagtgagctatgatcttgccaatacactccagcctggggcgacagagtggaccttgtctcaaaagaaaacaacaatgacaaaagaaaatccctatagaaaatgaataattttttttggtaaggttggtatatttttccctttgggtctcagaaattatttatgcattaacgataaccagtgaaatctaagtattgaaaatgttttataaatagacttttctatgactgtacctctcatatcatctccattcatatttcatattgatgtgtaagagaattctgcattgatcaagactctttggatctgttttgggcagcacttattcaattattaatattttaaaatctttttttatttaccatttacaggaaatagtagtagaaaaaaagtatagctttttatggtaatgtttgaggatcaaaaccttagtaaactttattagtatctcatatctattttaaacttgaaaacatgttatcttattaattttccaggtataaaatgaacactgtacatatcctgcaaacgtttaatttattcatattgaaatctaacggaactgctaaggatttaggtgattacttaaaagacctcgatatttctcctaagtgctgtaggaaaccatagatacttggaggctggtatgtttgagtctctgtgtgtgtatgagatgtgtgtatatggggtgtgtgtgtatgtgatgtaattgtgttaatagtttataaagggctgggcgtggtggctcatgcctgtaatcccagcactttgggaggccaaggcgggcagatcacgaggtcaggagatcgagaccatcctggctaacacggtgaaaccccatctctactaaaaatacaaaaaattagccgggcgtggtagtgggcacctgtggtcccagctactcgggaggctgaggcaggagaatgcgtgaacccgggaggcggagcttgcagtgagctgagatcctgccactgcactccagcctgggtgacacagcgagactccatttaaaaaaaaaaagtttataaaggtcactttgatcacattgtgcacggtaggatagaggagataggtatggatgtgggagatattgaaccagttcaagtgaaacaatggtggatgaaaagatatatgggtgacaaagttgagaactatttcaatggtctttaccaacatgctgacttggaagatataagtgttttatcccatgactttgatgacccctttatggtccatccatttgcttatttcatccaagaactccactggttagatgattataatattcacaacccaggccactcaatgttatatctccaatatcgtagggacatagaatatttattgattttgaatagcattatttcttatgcattggtcatgttttgcagggctggtgcaaacttgagattgaatggtcagaaaggaaagtgtgggagttgtatgcttagcatcttacttctcaaacagcttggtgtagtatacaaagtactgattcagaatttagagagaccctgagtaatctctattttttgctagctgctaaccttggacaaagttcttaactttccttgtaagttgatcagagtaataactttcttgcaggtttgttgtaggtaaaggcagaaatgcatgtagatgacctggaaggatgctgggcttctcctaaatagtatctttggtattctattatgattacttttggagcagaacataagcttgcaggatagtgttaaatgcaaggtaaaattactattttatattttgcttgaaactcaaataaagataaatttttatacttaccatcaagatgctcaggataataagatcattcgtgttccacaccaagcgtgaaggtttcatgtctgccttgctttattagtgaagataagttttttccttggctatttttggatgtgttgaaacaaagcagttttatatcaaccagtataattttccccttctctcacatcgagaagtgagcaggagttgtctgtctaagcaagtagttttcacatatccaacatgcatctgcaaaaacttaacaatatcctctagaacacagggaatctttcttggacaaagttctgctcatgttcagcctctctcttagaactagaactgagtgttattcctgctcagtggctccgtttcaccccaccaaagctgacagtggggcatgtgtaacagactgaactggaagttggaggaaatgaagtaaaattacagttctatcacatactggctgtgggaacgtggatatgtcacttaactcaccgagctttttttcattgccacctgtaaattgggaacacatatattacttatctcaaaagattgctatgaagattaaataaaggcacatgtaaagacacctggaatagtgcctgaatgtagtaggcagttgtatccacccaaactagtactgaaaagaaactcattgacttccataaactcaaagtctgaggagtaaagatggcttcaggcttggcttggctcagtgtccaaatgataatcccaggttttatgtgacagttctgtttcttctaaaatagcttcattctagctccatatggtgactttcagaagctttgagatctccccacactatctcagtaaaagagagatatattactactctctgctgtcattatatatactatgtgtcaagcactgcactttacacaaagctcacagggtacaaatgcaatgaggttggttcactgaaggcaggaagagggtactgttgctatcagaagaggagtggaggtgaggcttttaaaaactaacaaaatatgtacaatatagcatttaataattgctcaaaacaaataaggtcaagaggctatttgactgtaattgacatttgcactcacaatagtgccgatttccagagcagtggttcttagctagaggtgattttgctcctaagggacatttgataatgtctggagacatttttgattgtcacaacctgggcagggggtgttactggcatctagtgcataaaagggccagagatgctgctacaggcacagaatagtccttgacaacaaaggattatcaggtctaatcatgtggttgagaaaccctactctagcaggtgtatgagccattgaaaatcatcactaccatttactgagcccttactatatgaaagcctctgtactaagaggctcattacctcatttgagctactcattatcatacaaactaggggatacagttatttccctcttaaaatgaaacctgggcaatggcaagaggtccgaagacacaaagctgataaattcaggactcacgctcagatcttttacttccaaactccatagatttttaagaaggctcaccttctactggaggttagcctagttcttagttaacttctgcagagctaagggagagaaagcatcttttacttccaaactccatagatttctaagaaggctcaccttctactggaggttagcctggttcttagttaacttctgcagagctaagggagagaaagcatgcttacataaccaaagcttgctaaatccattttggatgatcttgtgagcatattatcctttcccactgaagctgcctcaatgtgaggaaggcatctgtcaataagccacagacttgcaaagatgctggtgatgtaaatatgcctcctgagctgcgcactggggtataaatgttcttagtttgacttgactttttggaaccccctgtatgttctcttagtttggagtgtaggcacatacatctttccagggcagcactatgtggatcataggtcattagggtcttctgcacagtgtttttctccttctcctcctggtatcataaaatctgaccatattctctattttttgaggaaattcagaattagaatataacattttttaataagatgaaattgcacaattaattacccttggagacagagaataattagtttatcttgggggctaatggacatattgcttattttgtttgaagttttcttagtcttttgtttgtttctttccacttcaaagccctgaaacctcacggcacatcagactggcaggggcactaattttttatgggaagatccaattgacatgaagttctaactgcagcaaaatctcccttggaaccattcttgcaatgtgattgtgtagagaagggtggcaggtgtccagtccctttctctgttaactgtacagcttgctgctgagttagcatgcttcaatgtcagacttgccttacatcctgactgatttaaattaataccctgggtttcgcacctgcaggagccagagaagctcaggtgacatttggcagaacgtactaaataattaccgcacatgagtgcctttctttaccagctggagagagtctctcttgtgcttttgacatcgttttaagagaaacttttaggtatgccaaaaatatgtgaaaatccaaattgcatatacaaatacttttccttaaatggagttcacaagcggtttttgaaaaagatttttatttatttggatatgaaggcatctgaacagctttagaaaataatttgtttttttgtatatttcaccctaaaaccagcctaattggtgaaataacttttcattcaagaaaaaaactgtttactcctttaattggtgagtttacaggtaaaatgacaattgttttgatagcttatgaatattttctatttatttgaatatttgaaatatatgtgtatttgcatatttgaaagctacatattcccaatttatcttcttaggtagcttcttagtaatctctcatttctgaatgttttacagagcatacacttatccttattgaagaatttaaagcaagtaagcaatccagtatgctgagctcccccaactatgttgagtatgacaattagaatacaaatgtgctggatctaacacaagtttgctcaggagaagtaaagtcctcttcttttgtaagaaaaagggaacaaacattgtgtcatttaaatggccacttgttattcattagcattttcctcaaaaataattttaattacaaagataatgcacacattataaatattccaatagtagaggcatgtatgaaatcagaagggagcattctcttttctactccacggagtaacctctttaataatcatcttaatagatgtttcattattgcatgtctactgtctaccacacagtgtgctaagtgagaggtatgaagacaaacaagacaaggccaccattctaagaggcttagctagatcctatccacctctgagcttctgtgattttattaaatagcatgcaaaattcttgaaagaaaggatgacttttttctgacctttgaggcaaaattaggcactcagcaacataccttgtctgtggccatctttaatgtaggtgatggcccactggtgtttgtgattactttatatgagatggtgttttggaattctagaaagggctagtaaaaaagaatcattccttcctttatgcaatattcacctagtgcaccctaatgcctggtgtggttttaagcactgcagatgtagcagtgaaaacaacatacaacttactcaacagaagagagagatatagacaatgatgaacattttaaaaggtaaaatagatgttagattgagtcccacagtgaaaaataaagtagggaaggatgatagacagtgccaaagaaggggtgcaattttaaagagagtgagcaggactggctttactgagtacgtaatcttaagaggtgagagtgtgagccatgtaagaatctgggggaagagcattccttccagaaggaagatggaagaagatgctgaagaggaagtattcaaagaagagccaggaggttgatgtgtctgagcagaatcaatggatgggaagccacatgacacaggtggagatgcagcggggtcaggccatgtggagcttgaaggtggttgtgaagaatttggcttttagtcttagtctgatggggagccctcaggggctgtgtagagttggacaactacagagtttgagcaagtccccaagatggctctcacttctgacaccaactgcaagttcatgggtttctaaaactaccctaagatttagtaagtcactaaaatgactcccagaactcaccaaaagctattaaacacacagttatggtttatcacagcagggcatatagattgaaatcaagcaagcaaagaagtgcatgggaggatggagtccagagaagtaccaattgtggagcttctgttatcttctccctgtggaatccaggcatgctgctttcctcctgcctgcatgtgacattacacatggagcattgcctacctacatgcccctaagccaccactcacaaagattttactgggctccagtatgtacgtgtgattgattgattgattggtggatctcagtctccaggctgactgatatcacatgacctgaagccgttatcttgagttatattgttcctgtctagctcaagttttccaggcaggcaaacattaccttgcaggagatcctagcaaagggctatttttagatgaggttaaattcttctctatgctggaggtgttaggcaaagaagtgacataatcttttttttctttaagactttctcaggctaaaaccagttacggggtattgtagtactcatgtgagggacaagaatggctgtagccatgtgggtaacagtgaatatggtcttaagtcttggatgatgataggtttttaagctaaagccagaaggatttactgacagactggatgtgggctaagagggaaagggaagtgttagggaccctccaggagcagctaagactgcagagaaagggtgcagagtgagcactggggctgaggattttccagaggtcagttttggaaaggttaacttcagggctcattcagcagtttaccccacttactaaactgccatttcatcttgtcagagattagtaaagctacacattgtgtttgagtttagaactgttaaaagcactgctaattccaacccatttcttataactgctattgcaggaagaatgtgtgaaaatgctttcttcacacaaggagacagatcatatcataaagcaaaaatggaaaaaagtgatcttcctttgactttatgcacatcataagtgataaagaacagatacaattaataaacaaccactgtctgttatactagctttgttctatgactacagataattaatttattcttctgtttgttggttggtttttccaccaaccttcaagtccaggcagtaagtattagaatttacatctaaaagtgatagcgaaggtctctgtgcacatttgaggggactctggctgttaggaaacctgtgctagtgatgatgaaatggcaggaggagggccacagtgtggccctgcacagtctgcactggggcctttctcttcaccctgcacaccagctaggaagctttatatctcataaggtgtgctaatcctccagcacagacactgtacttcactggagctggagaaacaaaacacccaatttttgcatcctagtttttctttaattaaagctgatccttttcttagagggcgattcctgtttccaaattcatattttcattctcaaagaagaggtttattttattctgttttcacccacccatgagcctccacatcactctttctcccagtcacacacgttccattcccatacttcttagtcattcttgcttccctactgctgttctgggttgcagctgcccgcatttccttcaaggcaaatatgtggctgtgcctctctcgtgaggttttccaaagagtcctgttctctttggctttgacgttttaaagggttaaaatagcaacaacaacaaattctaattaaatgcttatttgatgccggatcctttgctaaatacaaaatgcaatctctcaccattctgtgtggtttgggaaaccttgttattcacatttgaaatatgaagtcatggagacttcgagaagtcaaggcacttgtccagggtcgtgattgcatcatgggagggagctgggattgagacttcttatcttccagacatagctccacatcacctggagcagggctctaggaactagacctgtgtttccaaaaatgtggtatgattttgggcagtagaggcgatgttaaataaatatgagtctcacggtgatagtcattttcttttccatttactttttgatctttttggttgaataatggagaaacatttcagttggatgccgcatgcctgacacacatctctaaaactttctaatgtacctgtgttactaagaagtgagcaaacttctagctcaaatctttgacagcaagaggatgtagcagaatttgataacaattttttaatgtattttttttagatggaatctctctctgttgcccaggctggagtgcagtggcgtgatctcggctcactgcaatctccacctcccgggttcaagcaattccttacctcagcctcccgagtagctgggattatagtcgcacaccgccatgcctggataatttttgtatttttagtagagatggggtttcatcatcttggccaggcagtcttgaagtcctgaccttgtgatccacccgcctaggcctcccaaagtgctgggattacaggcatgagccaccgcgcccagacttttaatgtattttttaagtctgctttcaatttataacaggggatactggtttgctattgatgtgatgattctaacttacaaaaatatattcgtttaaggaaaataaagcaagttgattaaaaatgaatcacgtaggtggcacaaagatttgacaaccatcatgaaagttgtttgtgaatgatggatgtcgccagctgtcccatgctcagaatcctgagtggcaagtgatacatgatgtgttatctcacatcaattcccatttctcaccctaccagtcatagaaagggctaggaaaacaattgcagtagcaggtgggccagattcccctgatttccagcgagtacacacacggggcactaggagaatagactgctgctttgtcttaagctgagatcaaccaggcagcaatgccagtgattggaacaggaaagacaacaaagatagtcaaccacagaatgtccttgtcatcccagtctgtactgaagcaacagttccctaaactcggacactgccttgtatagaaaacctcttaccaggtattcattacctgggttctcccttgtcctcattttggtctatttcaatgattttcaactggggatacttgtcaatgtctggagacacttttggttgttaaactgcagggtactactggcatctagtgagtagaggccggggatgctgctcagtaaactacaacgcccaggacagccctaataacaaagcacgatcagaccacgtcagtgttgctgactttagtagagctgagatcaagtccgtattacaagctccttagaaattcctcccaaatttattcctcacaatgaaactcctagaacctacgtggctaagcctcttgcttcttcatctcatgtctgtgaaagtacgttttcttgtcatagtgttgttggccttgctatagcctcagggggagggggaggggattgtactccacttgttcaaactgtattttttttttttttttttttttttgagacggagtcttgctctgtcgcccaggctggagtgcagtggcgcgatctcggctcactgcaagctccgcctcccgggttcacgccgttctcctgcctcagcctcccgagtagctgagactacaggcgcccgccaccatgcccggctaattttttgcattttgagtagagacggggtttcaccgtgttagccaggatggtctcgatctcctgacctagtgatccacccacctcggcctccctaagtactgggattacaggcatgagccaccgcgccccggcctcaaactgtatttttagtttgcctcactttcacagacaaaagtaaacattctgtgctttttttttttttacttttaattttatatccctctctgtcaggtgcttcggatctgtttctctcaggtttttggattccagattttcattttcccaacgctgacacccacccctcttctcaactgtacatttccttttttaattgccgcatcagtatggctcatgcaaccatgatattattctcaaatgttttgcatatgtagatcttgtctctccaaattaattctcagctcctcaaagagaaagcctatgtttacatccttcacagcggctgttatgctttgtctctgataggtgtaacaagtaccttattctttcaattataacgtaattgtaaatgtaaaatacaacattgatttaatagctgccttggcaggggtagggaaaaagaaaagcttaccttaaatatacatgttggccgggcacggtggctcatgcctgtaatcccagcactttgggaggctgaggtggatggatcacccgaggtcaggagttcgagaccagcctggccaagatggtgaaaccccatctcaactaaaaatataaaaattacccaggcgtggtggcaggtgcctgtaatcccagctacttaggaggctgaggcagagaattgcttgaacctggaaggtggaaaggttgcagtgagccaagatggtgccactgcactccagcctgggcaacagagcaagactgtgtctcaaaaaaaaaaaatatatatatatacacacacacacacacacacacgtatacacacacacacgttgaggtcaaaatgtgttctgcttttggcagtgtccatatattctacacacacacacacacacaaacacacacagagagagagagagacagagagagccatgtgcacagaatacatcttggaagcaagaaaatatgaaacttattggcttactgatttcaaatgtttacttattcattctgtctaccatgagataatttattttagttttcataatttcaaccccattagtatttttctaataagatatgttagtgtgcaatgttatgggcaaaacgagagaacagagtttctgaagttgggcactcagtgcatatgaaccatagtgtcttggtcttgaatcttcacagtacccaggatcacagtcccagcacatgcacacttgtgctctgtccactgggggctcagccccgcaggctacccctcttcccaccacctccccaacatgttggcttcacttacctgtgtcccaccttaaagctttatatgtgcagttctgtctgtcaaggctgtttttcctgccttctttctcaaaccactcccctccccagggtaactcaatgaattctcagtgtcagtaaaagttgctcaaggaagcctgggtcaggttcccggtgatgcttttcctagcactgccttctgcttcacaattcattctacagttatttattgaacatgaaatgtaaaccaagccatgctctaggcattagtggaaaagctgcgagtatatcagaacaaaatccccgtctacagggagcttacattctggtaaagtaatggaagctctctttacttcaagatgtaattgtgtactctacatatcctatttaatacttgcagtaaatctaggtgagagttcttagcattacatttgtttacatataaaaatgcagatttaggcaggttagatagctgacagtaggtcacaaagctggtgagatggcaggccagccaggtgatccctggtcaagctcctgcattctattatgttgcctttggtaggtggaagaatgaatccttcccaacattttctgagctattggttccttctgaattcttgaataattgaataatccatgattcggagtgacaggcatttcatttaggcaattattgggaaactcaaaactatacctgcatctatatggcagcaatattattatatttgaatccttatcatcacagaggaaattagaaaggcctaacttaaactttttttttaaccttctctgggtttccaatccactggtttccattaatgtacggagtgtttgggccacttggggccactttggatacaggaagagcatccagggtaaaaatcaatgggtaaagagaaaggaggaatcgggagcaacagaagttaaagcaggtggctttgctattctgctaaagggtaaacccattagaacatctttgttctgtgttgcattttctctggagacgagaagcagacatggctgtaggaggttatgtaagaccattagcctgtttgatgtgcctttcttttcacttcctttttttggtttgtttgttttcttcttactgccttggggagttagcccatcatatggttttgatggaggcatgtagtaacattttagagtgttgtaaagctgcttatgaaacggttccaaacacatcaattaggaggggtggataagataaaaggacttgtgggtagagtatagaagagacctgatggaagagcatctgaaggtcagtttgtggtcattagcatcttcatgggtcaggctgtccaatgaaggacacatggctttgagcaataggagcaaaagtcctaacaatttacaccaaaggcctcatttctgttctatttagagctcttaatgcattttgtgtctttaatgcacagtggtgatttcttggccagatctggttgattaaggccttttgactctcacaacttaaaaagaaaatgaaacaagttgctgacatataaaattcaggtgacttcacataaaagtcaagaagtcttgcttctcttaaacataatagaatgcaggagcttgatcagggatcacctggctggcctgccatctcaccagctttgtgacctactgtcagctatctaacctgtctaaacaatcagaaactgtgagtaccttggacgcgtatttccccattcccccacatagactcctgtctagggctgacttctggataccatgcttagacaggacctgtgctctctgctagctgcgctacctctaccctaggtcatagtgagtttgagcacctttatgcattcacgttctctgcctgaactctaatggaatttgaggttgtgtctcctgttgttttctgttagtggtaagtggtgtgtgtgtgtgtgtgtgtgtgtgtgtgtgtgttccagatcttcaggcagaggagagggaagtccatgtacattaaagaagaatgtttagtcctatagttttggtttcatttgtttttgataacaatatttatttagagatttaaatgtcattaagggaaggttgtggatttattatgtttcttaaaagtgggcattgggggccgggtgcagtgactcatgcctgtaatcccagcactttgggaggcagaggtgggcagatcacgaggtcaggagttcgagaccagcggccaaaatggtgaaaccccacctctactaaaaatacaaaaattagctgggagtggtggcacatgcctgtagtcccagctactcatgaggctgaggcagaagaattgcttgaacccgggaggtggaggttgcagtgagccaagatcgcaccactgcactccagcctgggcgacagagcgagactccatctaaaacaaaacaaaacaaaacaaaacaaaacaaaacaaaacaaaacaaagtgggcattgggtaagagtgattttccaagagtaaaattaattaatgggttatgatataaattaagcattccaccactagtattacaaataagatagaatagaaaataatagcatgttatagattgatgatagattgataggtatactggctaaaaatctaaactacatttcctacggcgggttgcagttaacaaagactttgaaagcaactagattgtccaagcttgagaaacatagctgcaagttttggtattaatctgtcacactacaagtatttctgagtaacaggtaccttcattacttctggaaccaaggttggcatttaaggaagtaaataaatatacagtgacctctgccccaggggaaaccagtggccactttttcctcttaaagaattgattaagattacttccttctcttgacaaattaatatttcctaattgatggaataaagatgtatgaaaaacaaaaccttacagaattggatgccaaacaatagagtcaagtttgtatggcggcttaaataaggaagaggaagtagaaagggtttaagtattttaagatgtcttcagggaagaaatgggactttactgaaaatgccttgaatttcagtttcagatcttctttgggttaaaatgacttaataattaaaatcacatgatcaacctcatgagctagttctttagattagcttattgaaagagccttcatgtttttccctctatttcttcttcttctttttttttttttttggtggggggatggcacctctctctgtcacccaggctggagtgcagtcgcatgatctcagctcactgcaacctccacctcccaggttcaagcaattctccctgcctcagcctccagagtagctgggattacaggtgccccccacaccatgcctggctaagttttgtattttttagtagagacagagtttcaccatgttggccaagctggtctcgaactcctgaccttagatcatccgcccaccttggcctcccaaagtgctgggattacaggtgtgagccaccacacccaaactccctctgtttcttcatacatggctcatattcataaaattcatgaaatttaattcaaatgtaatgggttttggcccactacttaggccatgccatatgtatagaaggctgtcatttggctgtggtactgggccaactgcgaaacattagatacatcttcctcgtattattgcattaactgcatagactgggctagactaaaaaaaataacagtggtttaggctgagaatttgcttagtttctatgctgtgttaaacagttctttagatgggagcaaaattcaggcactgaagctaccgttcagtttttcagcaagaaattctgaaatggaaggagtggcgttgtgtcttagaataattcggctctttaaaacaagcaagcaaacaaaacaacctcttagtttactgttggcatatgtatgtatcaaattcagagcttcttttaatatccctgcatatgattttgtccaagttctttaaaaatatttataataattaaatatatcttagtgtagttttatatatatacacacactaaaatatatatatagcatatatacacacacactaaaatatatagagagcatatatatacacacactaaaatatatagagagcatatatatacacatacatatactaaaatatatttaagtaaaaagcatttatttgtttcttgcctaattgtgtgtaccagtcttcccttattaatgaaatttatttctctttgtttacctttaccatctgaggtacagataccgttcttcttaacacttgatgttaattatcaaaaccatacaactttccgtgaagaacttctctaatgttccaaatattaattcagcacagtcatgctcattgaaaaaaaaattaactgcatttgatccatcacattgaatgaaagctggagtaatatttgatctaggattttaggaaggaaagaatccttaaagtcatggtctgtagggaaagcgagaacagaatctaagagacatagaatctttctgtctctctgcgctggcagtttctgatgaggagctattcacagactgtacaaaggaatacgcttgcacaggtatttctctttgagagtggcaaggtgaaggatagggaaggtgaagtatttattatactgcaaatcaagaaacagcttttttttaaaaaaaatttctgttttactttgtgataaaaccattcagcacaggttagcctggagtcccttggtcccctgcccttgttaataacaattaattgaacactttgaacattccgattctagttaactttgtttaacaaatgtgaacaagaataaaaaataataaatgggcgcagcctaatggagtatgccaggatcttggtgcattgaacttctaggcgctggattttcagaagctgttttgtttttgttttcacaggatgtgtgagactggtgaagggctgtttatctttcagacccgagacggggaggccatctatcagaaagtccactctgctgccttggccatagccgagcagcacgagcgcttgctacagagtgtgaaaaactcgatggtacgtttggaatttcttcctcgtgtcccagtgcctatcactgcagaaagcaattgggtcatttttgtgctggaaaatatggtcagcattatttgagcagatgactgattcctcttctcaacagtgtatcacttggattaaatggcattccagaatgcctgatgtgggccgttggtaataccttggccatacatccccattatctactttacaactcaatcgtaagggtgtgtaaaactaatttgcgtgtgtacagacatctatagacacaaccatgtggatcatctacctatggagatatgtcttgctatgtcagaagttatttcaaatgtcaacaggggccagagagaaaaatgtaaatgaaagaagagggctgagggaaactggagtgaaatgtcaaaagcccaagaccagacaactgttgacatgagaacaagagattgtgacatccatctaggtagatcccttgatttttcaagggaagccaaagatttgagtctatatgtaatacctgctagttggtaactgttggaaattaattctagttaagagtgcaacactttgtgggtcaaagagaacctgtctgcgggtgaactgctacccacagccatgcgtgtgccatctcttcacagtcatcggtatataaagatgcccaaacataaacacatagcacacataaacatgccctcagaacacttactctttgctttacactgtgctggggacttggattacataaataattatgttcatgaggccaggtgcggtggctcactcttgtaatcccagaactgtaatcaggctgaggcagactgattgcttgagcccagaagtttgagaccagcctggacaacatggggagaccctgtctctacaaaaatacaaaaattagccaggtgtggtggtatgcgactgtagttccggctactcaagaggctgagataggaggatcacttgagcccaggaggtgaaggctacagtgagccgagtttgtgccactgcacttcagcctgagtgacaaagagagacactgcctaaaaatttaaaaaaaataataataattatgttcatgagttttttctttaaggagggtaaattcatgaaatcataaatcataaatgaatgcacaacacttaagtaatgcacatcatgcgttgtggctgcaaatgtatatatagagcttcacatctggaaggaaatatacaaaacaaaaaggaattgcgttggcaagattagggtagtttgaaactttatgattgaaacatgtggggtggttggatttaaagagtggaggggcaaagcatgccagtaatgtgatctgttccaacacagccccgggttattcccaaatgacgtctataggcagcaatccgggattttagagccggggtcagcaaatcttcctgtaaagagacagtaaatgttttatgctttgtggactaacatggcctgcaagtacttaactgcccttgtagcacagctgcagctattggaaagatgtaatcaaatgagcatggccatgtctcaaaacaaactttattaatggacattgagatacaaatttcatataattttcacatgtcaggaaatattactcttctgttgattttctctcaaccattaaaaagtgcaggtttttttcattgtttgttttttgcatatgggtcattcagaaacagtcagcaggctggatttgggccgcaggacagagcttatacttggaaaagagcaagtgcctgcccccgtgagccagtgctgacgtaagcatttgcgagaaaccaggcttgaagacttgtgtatgatttcagaggtggtggacgtgggcatgctgaggaggcctggaatgaattaagggattctgatggttgtttttatatgtcaacctgactgggacacagggtgcctagatatttggttaaactttcttgtgagtatgtctctgagggtgttcctgagtgacagtaatatttgaaatgatagattgagtaaagcaaattgccctctgctatgtgagtgggcctcatccaatctgatggaggccagaatagaacaaaaggagggtaagagagaattagctctctttgtggtcttgagttgggacattggtctcctttggccttcaaatccagaccagaaaccatcaccattggctttcaggccttcagactgcatatcttggtgtatatatcctatttactctgtttctggaaaactgtgactaatataactaatttaggggtagaaacagataaaacagagataaatttcagtgccatcatacagtgttcaagatcatggcccgtgaagccagacttagttccaacaccatttctgaaacattccagctttgtggaggagaacaaagttcttgatatccctgagctccagttttctcctttgtaaaatgggaagggtaatagtatttatcttaaagacccctcttaaagtttaagtgagatatgctcataacatgttcagcccagagctcattatatagctttccatgaactgtagctgttattactgttgttaatagctgagccatcattagcattgctgttaatagctgagcagactggttggtccagattgatcctagcaatggctgatgaaaatggctggaggattatctagtaacaacatctaagcccatttacatctgcgcctcatctctctctctctctctctctctctcgtcacctctctctctctctcgccatctctctctctctcgccatctctctctctttctaaatgtctaagtagagcaaatgtaaaattagattgagaaggaatggggaatgatataatttaatagattttagagaattagaacctactataagaaactataagaaatcattatatttattattttcttatttcaaaaggaatctacacattattgaaaaattgtagacaacacagcagaacaaaaagaacatagtaagtcatccctctgcccgccacacaagaacatacctgtttctcacttttgagtgggtagctttccagtattttaactaggtggatgtagaaaatagaattatattgaatacattgcttgtgctagctttttgcaagaaaatgtctatatattgtctctttaaatatcatctgcaacatcatattttgtggtcctattttattatatggatatttcatagatttttaaaactatgcatcaaggttgggtacggtggctcacacctgtaatcccaatattttaggaggcctaggcaggaggatcacttgagaccagaagtttgagaccagtctgggcaaaatggtaagatctggtctctacaaaaaatttaaaaactagttaggtacagtggcttgtgcctgtcctcccagctactcaggaggctgaggcaggaggatactttggccccaggaattcaaggcagcagtgagctaggttcccgccactgcactccagtctgggtgacaaagggagaccccatctctaatatatatacatatatatatggttatatatatttatttatatatatggttatatatatttatatttgagtttatatgtatacataaaacaacaacaaaaaacctgtgcatcagcttgatgctcagtctgtatgcatcaatgactatctgtttaagataaattcttaaaacttgattgctgaatcaaagtctgagaatgcttttaaggatttgcttttctttccaagcagccttccaggaagactttcttttcgaactaatacaatcttggtatttattttcccatgtacttagaaattctggatatttcaataaagagacatcagtggatggatggagagagacagagggaggggaatgcgagagagagtgagagcgagctgtgaagtagaattcaagtcactgaaaacttacagggcaacatgtcattgtattagtgttgtgcggctattccattagatccctttaggcacctgaagaagtttgtctaagattgtcttgttcgtagagccatcaattagcataaattgttttgtacttgaaaggcgggttctgcatgctcatgcacatgtttttccatttacaacctcctcattatttccgctaaaaattaatcaggaatatgagtaaatcgtttggattatccctttgcaaatttaactagaaaataatgtcacttgctcttaatttgctgtatgcttaatgggttctataaaataaatgtgatttttaaagccacggcatcctgttatagatggaaatgagtaagcttcaacatggatctgaatcttaaggagttaaacgagggattgtgaaaagcttaaaatcaatgtactttagtcaatctctgattaggggataccatgctaaaataaaacaaatgaaggcaacattactggctcaccctgcctcggttattgttttgccttttctggtaattaagagtggatccacatagccctggctacattccccactaggaattgcctttatatgactgctgacttgcttctatgagatggccaagttcataaccggagaaagacggcaaaactcatatctggccatagcctcactattaggaagtcctaactcattgtttactgtcactgttgtaaaattcccaagagtgtgtctacagacagaatgttgcactgtggggccaataccaggctgaaattacagcctggagtgaattgatttcagtcagccttatgaccctcaatcccaaaactcataaagaaggggcctgtgggtccgataataatagtaacagttgtgggaggctgaataatggctccccaaatacgcccgcattctaatctatgcagtctgtgaatgttaccttacaaggcaaaagggactttgcaggtgtgatcgagttaaggatcctgagatggcgacagtatcctggtctatccaggtgggtcgaatataatcacaattgtcttcagaagagggaaacaagaggagtcaaacagagggcaaggcaatggtggaagcagagagacagagatagagaaggggtggagagggagattttaaaatgccacgcagctggctttgaaggtggaagaagggactgtgagccaaaagatgtttgtggccttgagaagttagaaaaggcataaaaacagcctagcgcagtggctcatgcctgtaatcccaacactttgggaggccgaggtgggtggatcacgaggtcaagagattgagaccagcctggccaacatggtgaaaccctgtctctactaaaaatacaaaaattagctgggcgtggtggcgtgtgcctgtagtcccagctactgaggcaggagaattgtttgaacctgggaggtggaggttgcagtgagccaagattgcgccactgcactccagcctggtgacagagcgagactccatctcaaaaaaaaaaaggcataaaaacaggttctcccccagaacctccagaaggagccagccctgttgatgccttgaccacagccaagagaaactgatttgggacttctggcctctagaaccgtaagacaataaatttgtgtggttttatgccaccacttgctggtaatttgtttcgacagccatagaaaactaatataataataataacaaaacaagaatgtgttatatctctgctctgtaacagacaatgtgttaaggacattttgtgtaatttctaaacctcatgaaaactcttgcattgaagaccccaaaccaccagcttagaaggtattagggctcaaatttggaacaggtgtgctgacataacccctgccttacactgtatctttgaatcaagcccctagacacgttttctttatcctacatgagattaactcactgttattctgaaaactccaaattagtgaccaacatttaaaaattgagagctaacacataaatctcagatttttatattttcttgaaaagtgcaaagctctggcagtgctgatcttgcatcctgacaaggcaatgcttagatacacccagtagtgtctgtcctcacacatctttctctgggaccttgctactgatgctgtggctaactgatgtctatattactatataaattaattttctattgccatgtaacaaagtaccacaaactatgcaccattaaaacaacatccatttattatttcacagtttctgtgggtcaggagttttggcatagcatagtggaccttcctctccagtttttcacaagcctgtaatgtaggtttctgttggggctgcagtctcatctcaaggtaaaagtggggaaggatccactttctttttttttttttcttttttttttttttttgtgtagagaaggagtctcactctgtcgcccaggctggagtgcagtggcgctatctcggctcactgcacgctccgcctcctgagttcacccaccattctcctgcctcagcctcccgagtagctgagactacaggcgcctgccaccacacccggctaatttttttgtatttttagtggagacggggtttcaccttgttagccaggatggtctcgatctcctgacctcatgatccacccgccttggcctcccaaagtgctgggattacaggcgtgagccactgcgcccagccaaggatccactttcaagctcacatggttattggtggaatttagctacttggggttgtgggattgagggctacagtttcttgctggctgttggacagaggccactctcagctcctggccacatggaccttgccagcacagccacatacttcatcaaagccagcaagagggcacaatcctatgtatcacaatcatggaaggattattttattcatcttatcactctgccatagtctgtcgatttttttttctttttttttggagacagagtcttgctctgttacccaggctgaactgcagtggtgcaatcacagctcactgcagcctcgacctcctcccacctcagcctcctgagtatctaggactactggcatgcatcaccatgtctggttccttttatttattatttattttttgtagacatgaggtctccctataatgttgcccaggctggtctcaaactctgggtttaagcaaacctttttcctccgcctctcaaagtgctgagattacaggtatgagccactgtacccagccagtctgttgactaaaagcaaatcataagccctgtgcatacaaaggaagggcaccacacaagggtatgcccaccaggaggatgagatcatggggccacctcagtgtctgtcccctgcactgtgaaactttctggaataatatttacttagtggtttgatttttcacttttaaatatttttcctactttatggcacttgctagtaatacgatgtatttattgaacatctactatatgcccaactctttagtaataatagccactgttatttttcaggcctcctacaatatagcagatactttacttgccttttctctaatcaccacaataactctgaggtagattcatttgttcactctcattcatttgaccatttaaacatgtttattgagaacctactatgttctgttttgtgtggcaggataccgtggcaagtagacacttgaggcctatgctcctacagggcttacaatggaaaagaatattcatgatccctgacctggaaggaatcactgtcctatgatatagatgagaaaagggatgttcagcatggcgaagtcatttgtctgcagctacgtagctcattactactggagccaggaatgcagggtggttttatctggttccaaaactctacctctggccatgatgcctcactcctttgaagggttttaaagctcttatgtccccactgagcatggtcttagcattttcccttttttttcccttttttttttttgagacagactctcactctgtagcccaggctggagtgcaatggcatgatctcagctcactgaaacctctgcctcccgggttcaagcgattcttccccctcagcctccctagtagttgggattataggcacctgccagcacgcctggctaattttttgtatttatagtagagacggtgtttcactatgttggccagactggccttgaactcctgaccttgtggtctgcccgcctcagcctcccaaagtgctgggaccacaggcatgagccactgcacctggccggtctcagcattttcaaatgaccttgataatcagagtacctttcagaagcatctatcaatgtataatatatctttttaaaaaatcactgttagggctgagcacagtgactcatgcctataatcttagcactttgagaggccaaggcaggaggattgtttgaggccaggagttagagaccaacctgggaaacatagggagaccccatctctagaaatatttaaaaattagcccagcatgatggtgcatgcctgcagttctagctcctgggaaggctgaggtgggaggatgacttgagtccaggagatccaggctgcagtgagctatgatagtgctactgccctccagcctgggcaacagaacaagaccttgtttcaataaattatatatatatatatatatatatatatatatatatatatatatatatatatgaaaaatcactgttaaatgaaatctcatttatttgtgtagttttggctttagatagcagtcttgccactttattatttctcgtctacatttccactttaaaaattcaatgcattgttattattcactctaaagggggtgctggaagaagtgggggtgggcctggagtatgaggtggagcactaactgtgaatgaggcggggaggcgaggactgtcttgcaccagctgccagctgccttgctggagaagccgcagcaaaacttcaggacagctcaggcactcccctgagcagctatagctatttttgccacctttgagatcagtgtctatgacaaagtctaattttggaacaaggcgtggcagtgtgtgggatattcctcattccacgactgggcttgtcatttttagactttccttcaaggcgagagcctcaaggtgaagaatgcctgcttttaacaggtttttccaggggctccgggtggggtgagggggccccactgagggggacgttcaggcccctgggtgacttctgccctgtactctggagtcctgattacacacaggcttgagagttcaatctgaacttttttttgtcacttctttgtgtttctttgtttaaaggattgatttacttccaagctgggatttgcaaatacaatttgctaatgaatttgtagaattcaagtggcattcttccataatttttgaaatcaaattaatttatattcaatctaattttaaacgcaatatgctacacatttggctttcttagatatagaaggcatcaaagaaatcatagagtcaatttcattactattcagacactaaagtagaccctcgcatggtggagttttatgtgtgtaaacgctcttttcacaactcagcatctcctactctcccttgtacctccccaccacaagaaaatctgtctttccctcttctatttatgggctctggttaattgggttaacttatggattttttaaaatgtgctgcttaaagcaattatcattttccccctcctgaattaagccctttttatatcctggcatattaattatccttcaaaaaacttttatgaaatacctatttgctacttgcaaagcaatgtgttagatcttatggagaatatataataaagcataatttgttttcatcttttatttattgattgattgattttgagacagagtcttgctctgttgcccaggctggagtgcagcggtgcaatctcggctcactgcaacccccgcctcccgggttcaagtgattctcctgtctcagcctcccaagtagctgggattacaggcacctgccaccatgcccagctaatttttgtatttttagtagacacagggtttcaccatgttggccaggctggtctcaaactcctgacctcaagtgatgtgccagcctctgcctcccaaagtgctgggattacaggcatgagccacagcgcctggcatttgttttcatctttaaaggagcttaccatttaaataaggagttttaaatataccccttatgcaacagtgtaattctgtgggttcaatttgctatggtctctttggatgaccatatttattgaaattaaatccacacatctttttattcaacagtagtgcttctaggaatttactctgacgtatactagcagaagtgaagatgatgcgtacacaaatgttcacgggaggactccttcctttattcttagattcctctttttaacaagtatttgctgagccctgctgcccactagatagtatacgaggtgctggggaaatggctctgaagaagatgaagttcccattcttgcggagcttatttgtaagagcagaaataactagaaagaagttaagtgtccaccacaaggggacagattatggcacatgatataacaagaattacatgaggcagctaactagaaatagaggagattcatgtatagtaatgaccacatgaagagagtcatatataatcatatcaacgtgtgtaaaggaaatgaatggatatgaggcagatctcaaggtggattctgacaccttcactaacgctattataagtgcagaaaattaacttatggcagggtacaaatggatgtgttagtgttggctaccctttgggagcaagactatgatttggagagtctgggaagaggctttcatgtattactttatgtctttctctttgtttaacagttttaaatcatggctatataatatatttttggaaaaagaaacagtggttgagtttctggcatatggcaaatgtaattgattcaactggtaagagagagggagggttctttcacttcaagtacataaaaatgcatgattggctgggtgcggtggctcacgcctgtaatcccagcactttggaaggctgaagcgggcagatcacttgaggtcaggaggttgagaccagcctggccaacatggtgaaaccctgtctctactaaaaatacaattagccaggcatggtggcaggtgcctgtaatcccagctacttgggaggctgaggcaggagaatcgcttgaacccggaaagtggaggttgcagtgagctgagattgcaccactgcgctctagcctgggcaatagaacgagactcggcctcaaaaaaaaaaaaatcacgattaaagatgataacgccttaacatactgtatcaaagggtgctaccatcccatttttatggcttaggagtttgaagtgtggatgcacagataggaagtgataaagccaagctttaaacccaggtggccactggctccggttcccacacttgcaccactatgctgtacttactcatgaattctttagaaattaaaagaagctaaatgggctgggcactgcagctcacacctgtaatcccagcactttgggaggctgaggcaggatgatccacgaggtcaggagatcaagaccatcttgaccaatatgctgaaaccccgtctctactacacatacaaaaattagctgggcgtggtggcgcatgcctgtagtcccagctacttgggaggttgaggcaggagtatcgcttgaacccaggagtcggaggttgcagtgagccgagatcacgccatgaactccagcctggcaacagagcagcactccatctcaaaaaaaaagaaaaaataaaaaaaataaaataaaaaaaagagctaaatgagattaacctacatttactaatagacatttaacagagaccaaactgtttattcagacaggatagatgtggatgaaactcaggcttcttccttaaatttgcgatggctttgttcctgtgtattaggggaagaaaatctcattttctcagcacttctgtttcagtctcttataacaacgtaataacttgcaacgtgcaggggtgtgttttaatagtgctttcacctgattattaaatgctgccttagcttacacagctcctccctggagctgggagctcctgtcacggtgccagggatgttggttgactcgtggctatgcctctattggaaaaggagacaacttgttttgctgacagatcgtggctttgtttataaactcgaaaactagttttaatacttgagatgggggctccgtcagtaggcagtacattgcgaccttgatggcggcaaggcagcctgtcatgccacgacccttccctcatttggagatgttcacttcagagcataaaatcacacgtgcatctgcttgaccgtgtgggcggtggtgagtaatcctatttcccagtgtcgagcatggcaaagaagagagagatagaaatagtgatgaggactgagagaagaaagaaatcaattcagtgcagtttctgatctgttttgggaagtcaaggagtaagtttaaaaactcttaagatttttgaaatggtggtagcagggcatgaaatcaagtacaggacccttctaagcacagagccccgtatgactgcacacactgtactcctgtgaagccagccccagtgaagagttatgcctggggaacatacataaacagtatgtgagcaagcaaattggaacgcgtagtcaccctaaaacagcggttctcaattagtggcagttttatttcccaggagacatttggcagtatctggagtcatttctggctgtcaacaatggggtcccattggcatctggtggatagaggccaggagtgctgtaagttccatacaatgcttaggacagcccccctgccctcgacaaagaatgagcttgccccaaatgtcaatagggccaaggttgagaacgcttgctcttctgatagacaggttctgcttgaagctgggccagaattggatgggtctgtgtgtttggggttgaatatcgcttatgagctgtgcaacccagcttctgtttgccttgttcacatcatatgtaataagtgggtgatactaatgtctctgcctggttttgttagttcacatgagctagtgcatgtaaggcaacgagacgaggcatagtaagattcaacacatgtgaactattacagtgatttcgtctttttttatttttatttttatttttctgagatggagtgtcgctctgtcgcccaggctggagtacagtggtgcaatcttggctcaatgcaacctccatctcctgggttcaagcaattctcctgcctcagcctcctgactagctgggactacaggcgcccaccaccatgcctggctaattttttgtatttttagtagagacagggtttcaccatgttagccaagatggtctcgatctcctgacctcatgatccacccaccttggcctgccaaagtgcttggattacaggcgtgagccactgcacccggccagtgatttccttcttacttacacaaaccaatatgagttgggcgaggagaaagagactcaccttgaagcaatggggatataaacaggaaacaccaggaatttgaatgatggagccgagagctcttgtttccttaagaccctgatgatgtttgtgcagtattaaagaatagagcaagcacaaccacatgtgactatgaggtaaggcccctgtcttctgtgcagctcatagcctagtactcagcaggaattccagaaatacgcacagtcagttatacctgctttgtaaagcaaagtgcaacaagaaaacaatatgtgaatacatggtgtaggcgattctgcccagcagcccaccccttcaccctggcatgtgcttggcatcttgtcacaaaagcacctgcttccactgagtgtgagcctagtgtttaaagggacaatctgattatatgtgatttttatgttatgcattaactttaaaagctgacctctgagtaagtggcagctccattcgagcctgtaaacctctggaaggcagggacaaggccccatgggtgtgtaataagctcagggtctggcacagggcttaaaggtttgttgaatgaacaaaatagggatcaaataagttattgtgtgagccaagagaaaaagaaaaatcgaagccaaaataccaagtccagttctctcctaatgcccaaacagggcacaggttccaggcaagtctgctttaaaaggccacagaaaactcagtccctaaggatatctatttcaatgtataggtgggggagagaatttttttagtaaggaggcagaaaaagttaccggaggcaaagggagcagtgaatttgttttatgcatgtggctgagaattcagatggctccgaataaattgatgcaaatcactttcattccccatgaaaataaccatttgagtgcatctggtgctcggcaacatgctgcacttggaaatttggccccaaatggttgatttcactaacagtctgctttgtcaaagctgtaagccacaatggaggcattgtttctgccagagtctgctcactgtgtagtgtctttgctgcatgtttttttttttcccttagcaggaaagcggtctttctttcttacccacatttttttttctaacatcgaggaagtaagcctctactcactctattttcttgacagtttcataatattctgtgataccttggtaacatttggatgataggagtacccatcacttttcctccaaatgtcagaacaaaagagaggacttggagaaagtaaagacagctctttgggtggttcctgccaaacatctgtcagagctggaatcagaattaggcagcccatgaggactggttcattagaatgtcggggaagaccacatgtttggcagatcgttaatttccacttgaaagaaggcccctgggacagtgggggtccaagggcctcatagaggttctaatctcctgtttttccagatggtgggggcagcgtcatctccttgcagcctagacgtttggccagttgccatttctttaagctttggaaatacagttaaggtgccttttatcatttggaacggagtagatttgagtccatcctttaggatctgtataatactctcagtactttctatgagaaatatgtagaattgtgttatgaactgtagctctggagtaagaggccaggtcctatatcctggctggacatctttaccagctcagggtcctcgggctactaactttaccacccttagtacttgttcccccttctacaaagtgtggattatattagttcacaacttgccaggtgagataaggcaggtgatttcttggcacagtgcctggtacctattaaatatagcagcaacctgagctgttattattactgacttgtagtgggagaataaaatggcaagggaaggcagattatagggaatccccattcacacaaatgattcattcatttcttcaatcaattcatccatccataattcaattatccaatccctttttattaaatgcctactatatgccaggaatcatggtgggcacgacatctatgagcatatacaagaaatctctgccttcaggaaggagaacgctgctgcgaggagggtcttctctcctttttagaggaaggagcaccgttgtggaggcagacaatgatatatccaaagcttggctttcaactagctgtctgaccagacactctaaaatcctgggggacagagaaagtgtgaaagtttttattcattttaagtttgcagaccctggcacagtgtgtggcttataaatgatgcccagagtacatacatggatgggatgagggaatgaatgagccgaagaacaccgagtgcagaattcatcgaaaggggtgagggaaagagcggaggtttttaggtaggaagcatgtgagcagaaaacccagttaggaggcttcttctaattgagggataattagagttggaatgagtggctccatctggctctttgctgagagtctgcgtgctttatttccttcaattttcacaactatccttggagatagggactggtttttgaatcttatttatttttacataaacacatgtctgtaaaatttaactaactgcaaaattatggtcatatagatgatgattagtgctctattttttctttttataatttgtttacatgcattttccccctcctgtctctttattagcaattcctaaccttgttaagaagttcacatgtacctttccatgttttcctgtgtacccatattatcctgtacagatatgcacatctacatatatacatagacacatacacagatacatacaaaagatgggtgtcgtgatgcaattgtttattttacaaaattgtgatcacaacacacgactaacccctagtttttccgttcaacagtaaacatttaatggaaatagtttgaagtcttgtagtacagttgtaattcagaggttgacaaactacagcccacgggtgcaatctggcctatgactgtttttataatttaaattttattggaacacagctacatcctccctgttcatttatgagttgttgttcacactgaaacagcagagtcgagtagttggtgatggtgtggcctgcaaagccatttactatctggtccaaaacagaaaagtttgccgactttgttcctattcattctttttgatggctgcatgatatttcagagtcttgatgtaacataatttattaaacgtacgtataagaatatcagattttttgccattaaaacaatactctttgactgtgaagtgagtccctgaaaataaaaaacaaaacaacacaacaacatcaaaaccaataccgcaacaattatccttgtacacagttcttatagattgttaaccttattgaattgagtttgtgaactttagttaatggagttttctaaactcgggagtaggattgctgaattaaaggatttaagtcgctttttaaaatatttaaatcagtgttgctgccttgtcttttgaaatgctggagtatcttgcattttattggacatattagtagatccatttcataatggcagaaactgaggttcggtgggtcaccctttagttaagtagaaagtcaggacgggaaccaaaagccctggactgatactcactgggaactgaaaggaagaaacaggtttgggaaacttgtcagaggttgaaagcggagagagcctctagggtctgagggtaaatgtgtctgtggcgtgggtcagggtgacagggtaagggtacgggaaagaaagacgcagtggatctccaacttacgtgtgcatcacagtcacctacaaagcttgtaaagccacagatttcggggttccacttgagtgttttaacaggcctggggcagggcattgaaatgcacatttctgataagtactcaggcgatgctgaggtcgctagaccaggtaacatgctttcagaaccgatgctctggagtgaatttcaggatctggccccttagtcctgagaagaacaaaaagatgtatagtctcaagaagtgtgaccgtctcaagaagaaacaagggatggaatgggagctacagaaatcatagcatgcaccttgtgcttctccacccttcatgatacaacggttcacagtgagacatactcactgatcagtaatcacatcctgtgctgagaacagagtcaattcaggcatacttttctacttgtttcatcacatcggcgctagccagcttttagtgtgtgttagcactatatgttcacaaggttgcgagtgtttagggaaacaagaacaagttgtaagtgattatgttctctcattggagaaaattggatcctgttaagaattcattcttccttctctactaaaaatacaaaaaaattagcccggcgtggtggcgggcgcctgtagtcccagctactctggaggctgaggcaggagaatggcgtgaacccgggaggcggagcttgcagtgagccgagatcgcgccactgcactccagcctgggcgacagagcgagactccgtctcaaaaaaaaaaaaaaaaaaaaaaaaaaaaaaaaaaaaagaattcattcttcctgtaacacaaagaggaatgcagcaaatccagcagatggaggaaagaggaggaaccagaactgatgcacaggactctgtctgtatgccctaagaatgacttactcttctcatcagcacgtggttgccccacgattatcacaaaacttgttcaataacatctgcatctctgttccagaggaactggttactgccacttagcatagcaattagtatattacgcagtttgtatcgattaaatgaacctgctccgtcaagcagaacgagccccccaaaatgcagctaatgtgtttttctcaataaattatgcccctcaccaaaccatacaagatgcatttgtgagaactttaggaaggtattttataaacctcagaaataccgacttttcagacttggtaaatagattacacactgcacaagcacattttttatttttaatgtcttttagaaaatggattatctatgatcatcattcttttttaagggagaccatttggtctgagtcttgtagaaatgcagggaacattttaagattgagttaaaagcatacttaatattcatgaaatattttgaatacttctttctagagactcaaaattatgtttggtttctttgaggactctgctgctctcctttgaatttcccctggttttcattttctagtgtcatttggagaaaaacaaaagggttggggatagtgctgggggcaggacttataaaaccacagtgtatgaagtgggaagatatttcctctttataagattgcgcttagaggagtaatgcacttaacatatccctcagtgcctcatccacagatacagagtccttgaaaccggtgaatagaatactgtgcaagtgagcgaggaagctgtgatttattttgagatgcattaatttcaaaataaagcacttggattaaaagattctattggtaacatgatataaaatataaacagtgcaaaagaacatactctataaaacaagtctctgtcccatcgtcccagacacccagtttacattctctgaagcactttaccagattcctttgaatctttccagaatataaattgtttaatagatataaaacatatttatgaatacattcattcattctacacatataagtacctgttctctgtaaggccttgttccaagaagcaggagtacaacagagaacaagaactagtctttgtcctcaaggagtttactacattgctgtgggtggagaagacaatcaacaatcaatatataaatatatatcaagaactgatagttgctatgaagaagacaacagtgtaagacagagagaatgaccgggaatggtcactctggtaaagtgatacccaggcagacagccattcctaagggccaggtgcttcaggcccaggagcctttaagtgccaaagccctgaggcagtctgtgctttgcgtgtgcatgtgcaaagaggttggtgattctggagcagctgaaatgaggagaagagcatagcaggtgaattctgaaaggaactgtgagtcgggtcctgtcagaccctgtagctatgagctatggattttccttggggagagttgcgtagtcattggagggttttgagaaagggtgatatgctaagtttgctttcgaattgatcaccctggaagctgtttggaaacgactgggggtgcccagagcaagggtacgagcaagaagatgagttaaacgctactgcagtcatctgagtatctaggtgagcatcggggtacggaccaaggtggtggtgatggaggtgagggaaagtggtggatcctgggtatatttttgaagattggaccaataggatttgctgatacataagaagtcttatagagtagaggagatagtcaatctcaagattgtagttgtttctgtgtgtgttttaaccagaacaacatgtagaatggaggaaacctgtactcggaaggggaagaggttgaggggagaggagtatgaggagcgacagttcaggacatgttaaacgggagatgcctaccggtcatccgggtgggagtgggaaatagtctccttaatacacaactctgagatttgggggagagataagggttgctgatttccaactgggaattgtcaggttgtagatagatggtatttaaacccgcctgaatgacaagctgtctctgtgaatctgtttagattaataattcccttccttgtttttacgatcgtttcatatcactgcacaaagatttaccttttctcttcttattggctacagattagtctgttacacaataatgtgaaggtaagacttctctgtgtaagaataaaaatgaaattgccaactcatctacttttttgatatagcagcaacataagcaatttttgagtcagtctaaaatctattgtaatatgcaaattaaaatgaaattctaatattcatttaaaaaccggttatcagaacagtcttcaatatagtaggtcccaggatgaaaattgtggtcagcaggaaaaaaaaatattacagaggagattgggtcagaatttaattttactgtctcatctggtaaattaaacagtggttagggaaatgaacaaacaaagtatgatagagccaaaggatggactaagatccagacattgaaatgatgctgtagaagacagtatttaggaatgttaggatatgttcataatatactaaatgacaaaagaaaatggcatgagaatacgtacgctatccaatttgtgttaaatatacattatgtatgtgccttttaaaaaatattggccctggcaacatggcaaaactccatctctacaaaaaatacaaaaattagccaggcatagtggcacatgcctgtagtcccagctacttgtcggggggctgaggtgggaggataactggagcccaagagactgaggctgcagtgagccatgttttgccactgcactccagcctgggcaacaaagtgagaccctgtcaaaaaaataaagaaagagaagaaaggaaagaaaggaaggaaggaagggagggagagaaggagagagggagggaggcaggcagccagccaggctatctggctgggagaaaatataccaatatgtcaaaagtggtttttatttccttgttttgtttttctgggtaatggatacgggttgatttaaaatctaccttatatgttttcctgtattttatgaacataataaaaaatatagcaaaaggaagaacataatttattacatgttaaaaaatgtgtaataggccaggcgcagtggctcacacctgtaatcccagcactttgggaggccgaggtgggcggatcacaaggtcaagagatcgagaccatcctggccagcatggtgaaaccccgcctgtagtaaaaatacaaaaattagctgggcattgtggcacgtgcctgtagtcccagctactggggaggctgaggcaggagaatcgcttgaacccgggaggcagaggttgcagtgagccaagattgcaccattgcactccagcctggcaacagagcaagactccgtctcaaaaacaaaacaaaacaacaacaacaaaatggtaatgggtaataaatatcacaaaaacatggacccctccccgctttttggtgccaggcaaaatactaccagacccaaagatagagctgtcttggagactgtaaactccctgcaggggtcgtggctgaatgtgagggcttagagcttttttgcttttttcttgttcctgcaatggttccatgcctatagtaacatcttaactcaggcttgttccttggattcattgtacactcactgaaaccaggtgattcaatgtattctctaagcatattatttggtggttttatgtatggctttttgtcgttgttgcctaaaaatattttaaggtttctgccctcaagctagaaaaacagtccaatatcagatatttagatttgaaaagaaaatatgaatgcttctattatgaccttgttcagaaattcttgttaaagacagtatcatgatatagagctaattctaaatattggcaataaccatggaactccacaataaattatgcgtggcctaagaattagctgcaaagcgagaactattttctctcttttttactgaccagatattgaggactaagggagattaaataatgagcctagggtcatgcagctattagtggcagattctagactttaactcagattttgtgactttcacgtgggctcttaccaccgtggaaaatttcccagaatgattgttctaaaggtaataaatagcacaggacagtaattctcaaagcatggttcctaaatcattaagatcaaaaccatctgggaacttgttacaaaatacaaattcctggccgggagcagtggctcacacctggaatcccagcactttgggaggccaaggcgggtggagcacctgaggtcaggagtttgagaccagcctggccaacatggtaaaacctcatctccactaaaaatacagaaattagccaggcgtggtggtgcgtccctgtaatcccagcttctcctgaggcaggagaatcgcttgaacccgggaggtagaggttgcagtgagctgagatcgcgccattgcactgcagcctgggtgacaagagcaaaactccatctcaaaaacaaaacaaaacaaaacaaaaaacaaaaaaaacaaatgcctgggctccacccttggaaattctaggagtggggccaggaatctgcatttgaacaaaccctccaggtaatgcttctgcttgccgttggatagctgaactgctgacccagggcccagaaagcatagggagatcatgttttcaaatattattttcacaagagaataagtaggcagaacccaaagatattgttcaggaagccacctggagaatggcagtgaatgtggagggtagtgtagatgagagccgagatttcagcagaatgagaaaagcaggtattcagaggctggcttcacttggaatgtggttttattctttctctcttggactgagatgtcccttctgactcaactttgcccatgttttgtgcttgaaatattgatagaaaattagttgggttacatatatgaaacggaagatatgattagaattggaagtttctcaggttgagaatgtgttcaggcgtggatgtggcttctgactcagctgaatcttatcaagacagtgtctttattcagtcgctttagggcccaggttgaatgaaaggaaaattacaatacgatttgcatatgcagagttgttattggcaaagaccccacttgagttattaatactttaaggagcaacctgatgaaaatttaagagcttgatgaggatggaattaggtattgaggtactgatctttttgccatagtgaagatttgtgctcgtttctgaatgaatccagactgatgtcacaaagacggcatatggtactcatgattgactgtcgcagaaaacaattacatcctgtcgtgctgttcaattttgcaaaacacaatgctctaccataaaaacagttggattccagagaaggacaatatggtgcagtattgaggctaagacctgccactgctctgcactcctggtctcagactcatgaaagaagtgcaccagcagcaagtcagtgtcagcgaaaccaaatgaggaactgggaaaccagaaatgcatttggcaggtatggcagacagttgtttttcttttctcagtgacaagctatgcgcagtggtccggtcattagaatctttttctctcccaagagggctgatagaattttctcaccattatgaggaaagggccttggcaatcagcccttcactcactgtgagtattgggaagtttttacaaggcttttactgtgctgttaatgacaataatgacggcagggtgggggcgggggcaggggaccatgcttcagccagttgtcggtcaggtcttcattcaatgttactttttctggggctgcttgaccagaagtagccactcaactaattcatcatatcatgcttttttttttttttttttttttgagatggagtctccctctgtcacccaggctggagtgcagtggtgcgatctcggctcactacaagctctgcctcccgagttcacgccattctcttgcctcagcctcctgagtagctgggactacaggcgcccgccaccatgcccggctaattttttgtatttttagtagagatgaggtttcaccgtgttagccaggatggtctcgatctcctgacctcgtgatcctcctgcctcggcctcccaaagtgccgggattaatatcatgcttttaaaataatcttcagggcatatactactatctgcttttttttttttggtaacaggtttattgagatatgaacataccacacgtaccataccatatacatgtaccctttcaaactgtacaatttaatggttttaatgtagtcaggtttgtgaaactatcacaattgattccaaaacattttcatcaccctaagaagaaaccccacctcctttagctatcacccctggataccaaaaataaaattctaagctcttcagccaactggaagaactcctgttctctgctaaggacattcaaaagttaacctgaaaaaccagttcagcccatgatgggaagtgggggtcagacatgcctcatgataccctcctccctttggagttcaggcaaaactgaccagcattaacattaaaacagagacctcaagactgacaaaacagactctttgtaggagtaagatactaacatgagagatagcaggccctgaaagacatttaagtattttactccaaaatatattatttgacatattttgaaatgaccctgcaaagctgtctcttgtggggaaaatctgtattctgtagagaatcttcttcccttttcaggtgttttctctgatccaggagagaattaactaagagtctggtgcccttttaattctgataggatatatttaccatctcttctctctgaagcctggcacctgaaggcttcatctgcatcataaaaaccttggtctccacaaccccttaccttaactcagatactcctttctgttaattccaggcctttcgataaattccttcaaccaattgccaatcagaaaatttttgaatctacctatgacctggaagcccccatttggagttgtctcacctatctggatcaaaccaatgttcatcttatatgtattgattgatgtcttatgtctccctaaaacatataaaaccaagctgtagcccaaccaccttgggcagatgttctcaggatcttgtggggctttgtcaatgggctatggtcactcatatttagctcagaataaatcttctcaaatatttttgacagtaccctctaggcctcagcaaccactgatctatgttctctctagggatttgtttatttgggacattttatgtaaatggaatatcttagtttatttttacggctataacagaataccaaagactgggtaatttataatgaacagaaatttacttcttatagttctagaggctgggaagtccaagatcaaggtgctggcatcttggaaaaggccttcctgttgtgtcataacatggtggaaagtatcaagtggtgaaagagcagagagggccggaagagagaccaagaggggatgaacctactcctgcaataatacacctgaaaccgcctttgaaaaattatgacagtaaaagaaatctgacatggctgactccatcttgattctagcctcacaggctggctgccttcatttattcctgggcatgggccaagctaactttaagagaaatttagtttatagtttaaatgataatagcccttccctgaaactaaactgcccttgtaaaattaatgaaaggccaagttaggaggatgagaggggcctcagttcttctaagatttagatgtagtttaaaaatgaccggacattatactggaggccacaagatttgcaacttccccaattattcctgcaaataatatcactattgcagaacctgagattggccttttgagatggctgttcagatttttgcatttctgacaaccagatggccccactagacctgtaactcaactagtcctgtggtcccacccagaagtgggctcagcatatgaggaccattttccacacccttatgattgcatttccaaccaatcagcagcccccatcccctaaccccttgcctgccaaactgtctttaaaaaactcctgacctctgagccttcggtgagattgatttgactaataactccatttcccacgtggtgtgtctgacctcacatcaattaagctctttctttactgcaatgccatgatctccatgaattgattttatttgtgcaatgggcaggaataactcattagatggttacaaacgaactcccaagataatggcagcccctttgaaaggtttcgcctcccaaaacagtcacgagacaattaaatttcaacaggacttttgggggggacaaacattcaaaccatagcatggaataacataatccctggactttcatgactagcacattgttttcagaatcatacatgttgtagcacatatcagaacttcattcttctttttatagcaatctgaatatttttgttaatttgtatacagtttcatcacaggtctcttagttccatgagaaaagagacctgtaagcccaagcaactcccatgaagcaaagcgtcttctgcttctacattgtaacatgggtctcgtactgcatggttagcttctctccccagcagcatgatgctttttgtgcattcagaacccaattgatgacataagtcgattgattgctttaagtattttatgccaccaggcagcatcttgactcacttaggccaggttaggaagagacctgcatgcattcatgctgtttagagggaaagttcaagtgttgaagtacaagaaggcatttgtttgactttcacaaaggcttgtctttctactcttgtgggatcttgagctaacactgctaatagaattaataaatgttcagtgctaaactcccctgctgttggatagtcctaaatgattgtgcatatacacataagaaagatctttccccaaggtcctgcttctgctcatcacttgaatggcaaagtcgagtgaagtagtcttattgccacgttccccacagtcagtcacagccatgttaatttaaccgggacctaaagtttcagcatgaattcagccttgggctaacagtgcttctaatttgatagcttggttaggatttatttttgaagacaattttctgctacttaggcaaatcctgggttcattcattcattcattcattcatcacacatttgttaagcctctgaaggctctagctaggtgctgggaataggatacagagataaaagataatccctactttggccgggcgcggtggctcacgcctgtaatcccagcactttgggaggccaaggcgggcagatcacaaggtcaggagatcaagaccatcgtggctaacacggtgaaaccccgtctctactaaaaatacaaataatcagccaggcgtggtggcgggcacctgtagtcccagtgacttgggaggctgaggcaggagaatggtgtgaacccgggaggcggagcttgcagtgagccgagatcatgtcactgcattccagcctgggtgacagagcgagactctgtctcgaaaaaaaaaaaaaaagataatccctacttttcagcagttcatggtctagagcagaaggaaggctaggttagtgactatcacaaaacagtgaaatgatgagatatctggtagaagcacctgatcctattaagggaggagaagagacatcaggagagtatctaaaggaggtgattcctgagctgactcctgaagggaaggtagaatttaaccacataagtaatggggagaacctttgggcttaggagcagatgtgcaatggatttccaggctcttggaaatgcctgggctgaatggtgtggtttaggctatgttgaggcctgagaagggaagggtgtcaagatcagagccccccaatctaagaagtttggccgttagcatgaggatatatagtcccttgaccggttaactcaggagactaggctggatgtcccccatggttcttccaactctaacgttccatgattcttttaagtttttctgacataggaaacaaaatgggttatttgtaatttttgtggttgttttttatagagtccagggacatgattttagtaggttatacggggtcaggagtatgggtcacgtgtagtatacagtttgttccaccataacaccatttcttttcttttctttttttttttttttttttgagactgagtctcgctcttttgcccaggctggagcgcagtggcatgatctcagctcgctgccaccatgcctggctaacttttgtatttttagtagagacggagtttcaaccatgttggccaggctggttttgaactcctgacctcatgatccatccacctcagcctcccaaagtgctaggattacaggcaggagccactgcgcccagccacaccacttctatattgccactgagctcagatgtatttgaaaaattggaaattcactacaatattaaggttgtgttggttcctaagcaattttttctaagaaagggaagcccagattagaaggagtgaaattgtaaccttaagctggataggaaaaggtacttacagactggtgcacaggcatggcctcttccagaagatgaaccatgagcacaagtccctggactccctccctataaaggggtgtgcccagcctttgcagtcttgctcagctcctgttcatgtggctgcacagccaccattgccagctttctgcaatagccccttctctacctctgtcacctggacttcctcaagctggcacttccaatcaagtgttttctacattttttataaccccaaatcaacctccagtctagctgggctgtgcaaactatcccccaaagtaacaatgactctggttgtaaataggcatacatttgaatggccaacccaccccctgaattttcccacaattttgtgaatgggaggtttttcaagaacttctgtgtcaccttacaggggaaatccccatactttacaattctatggctcagggtaatttttatttttacttgttaatgtgaagatattatatctattgtaaaaaaaaaactatataaaaatatattttttaagtaggaagactgtaatccttctctccaaatacactaaatcctcatttaatgttgttgatagattctgtggctttagcagaaggacatacagcaaaaccaattttcccgtaggctgattgaaataaagaagagttaaattcctatggcatatttctggttacaaaaacattaccaaacttctagataaagacaaaaacacttctaatattacacattgaaataaatgtgagctatacgtacatttgagaaaagattaatcaaaacaagacgattatttacccagtggttccagttcagggtcacgggtggccagagcccaccatctctgcagctctgggtgccaaatgggacccagcctggacaggatgccctcccgtctcaggacacactcacccatacccacacccactgagacagggaccatttagacacaccagtgaagccaacaggcagttttgggatatgaaaggaaagcggaggacccagagaaaacacaagcaggcatggggagaacgtgccaaatcgacacagacagtgaccctgccaggaacagatttctatattcacattgaagttgtaatgaaacaaagctgaatgcattgacgttatttgaggacctgcggcgctccaggtaacccaatttcaactcttccaaacatgagtgctaactgctatttccaccagggcggtacatcagtgccacttgtggccctccactggtggttgatatcaaggatagagggactcagggcgtcacagaagagggagcggaaacctgcctactggattctcaccaaatgacttcctgcgtcttttctccctgacacaattatgcagacatttctgcattgttataaggcttttctttttgtccaaagacaattaaaatgcttctttcataaaattagatgtttttccaaagggttgagaaagaactagagagcccggctttgtaccgttctcctcttcaaaacgcggcgttgctgtcatttcactcttgatcccaaatcagctttctgaaaatacagtcaaatcatgctgggctgcctaaatatatttgcagtgaagtagtgaataatttgaagtgactagtattccacaaatgttttctttatatgaaattttctgttaaattaaatagaatctctttatatcaagaaaatcaaataacccctacctctaaattgagttcttttccttcttttattttttgaattccatgcaaatgaaatagaatgttactaaaagtcactggtaaatcgttctggatttttttagactttcatgtatacagaaataaccactatgagaagctgacgaggtgagggatatgttaattagctcaaatgaatttttttatagtatgtacatagatcaaaacatcacattgtactctataaatatgcatacttattatttgtccattaaaaatacattttaaaaattaaaaacaagaaacagctgcagaacttttctactagcttagtacttagcttttggaccttttcatctaaaagtttatttttaggaaaagttatcctcatggaatctaatcctgtgtgattccacttgggggcatgttttggtaattgtggaattatgatagggacagggaattcgattcagcaaatgtaaattcaatgcatacaaattaaattttcttttgagtgaatattataatctttttttcaagttgaatctcatgaactacaatgagttttggtcttcaacatatgaagcctcctattattttggctttactgagtgaattatgcctgaaactaccatgctgaggggatgtgtacagtggagacttttttttctttaagagattggaaatttttaaaaaaaaaatcctaacatgggcattgcaatttctaattatcatcatcatcatcatcatcatcatcatcatcatcatcatctccatctccatttttcccctttacctatttgttactaggtaagtccaagtaggtatcatctcatcaaactcttatactttccaaatggataggtgtataatttcgacaattttcatatgagcaactaaaatgacattgcactaggtctgtaaccccctgtgtctccttcgtggtacgacatataaatgtttcatttccaattcatgtaaatcttccatctttgccaagtattacattgtgcctatgtgtagttaactgggccttgaatgggaggatacttaaatagccgtcagctctcgccaatgtgaaattacctcccaatgaacatcttgcataaatctttgtgggtgaatttttttaaagatgggaatggattatttgatattcaagcatccaggaaattcaactttgcaaatagtcacttcttacacaatggcataatcaacctgcgtcatgattgtgtctaagaccagggctcagatacgggggtgcctggaggtctgcttccacttgcacccccattcttcttgcatgcgttgaccccgttcacctttccttttattctacccatcctacaggctcttttctctctgaaactttccttcttttgtataattctttccccgatgtggttggtcaggctgttgactgctctctgataatctgggggactagaactgtgtctttagagttgcctgctgccaaaagccatttcatcttttttcctccctcaatgtctggaacaatgatttgtcgacaatacttgttcaaacagacttttattttttctttctgatgccagaacacccaacacaagtcagtttaaactgacaagaattaggctgggtgtggtggctgacacctgtaatcctaacattctgggaggccgaggtgggtggatcacctgaggtcaggagttcgaaatcagcctggccaacatggagaaaccccatctctactaaaaatacaaaaaaaaaaaaaaaaaaagaaaaattagccgggcgtggtggcatgtacctgtacttccagctactcaggaggctgaggcaggagaattgcttgagcccagaggcggaggttgcagtgagctgtgatcgtgctaccacactccagccttgctgacagagcaagactccatctgaaaaaaaacaaaaacaaaacaaaacagaaaaaccccaaactgaaaagaatgaaatggctaatacaattgaaaagtctggggccagcctctggattcagtgggatccaaggtctcagtggagtgtgtgaagatctctctgcttttcttggctgtcttcttctgaatggtgtctactcactgtcacgtggtccctttgtagttccaagataggctccagtcccatctccagcctcttaacaactccacgagaaatcattcaacacatgttacttgtatatctattacatgcaaggcaatattctgcactctggggatagatcaatgaacaaaacagtcataaatctttagcttacttctgctgattctctcttccacaaaaatgctaacaatgtctcagtaaattatttcggagtggtctggcatgggtcaccagcccaaccctaaagtgaatgggggaatcagccccaccgggactagagggacttagctgggttggagggaagttccccaaaggaacgtcatcaaggcactgttgccagcagggtaaagaatggatggtgctaagtaagcaaaaacagtagctggccaccatgcccaccaccttcaatcgatgttcattgatttgcagcctggccagctctgtggttcttttactccatgctctcctgtttcctcagtcaggccactttcggccccagtgttgctgacgcacaactttcttccctttggctgcagctccagatgaagatgagtgagcgggccgcctcgctgagcaccatggtgcccctgcctcgcagcgcctactggcagcacatcacacggcagcacagcacgggacagctctaccgcttgcaaggtaagcgtggggctacctgtgtccagggtgtgggccaggcctgggagtactggggagggggctcagctcaactcgcagctgctgcatgccagctggttagtgcccttcctccaaaggtaggacccccatcaaggcctcacacacgaggcacttaatctttgtagagccaaatatctgtatggctctagagatatttgtatctatcacagtgtccggggggaagtcacttaaaatgaagattcttgggtttcatccccagagactctagatcttaaggcataggatgtggctgagcaatctgcacttttaacagaccgtacacagggtctgggcgaggggccagggaccaggctacaagaaatgatgtagtggactgatgaatcacagcatcagcattacttgaagtcttgctagaaatgcaaatttccatgcccttccccagacctactgaatcaggagctctgagggtggggccaggccacctgtatttgaacaagtcctccaggtgattctcccgagagctcaggtctaggagccaatgttttggtggatggggccctggactgaggccagaagccatggcttcaggtttgctgaatgactttaggcaaatcctagtaagctcttcttctagagaagtggtctctgaagcatgatgcagaacagcccatagtgtggacaacatgaacaatgaaaaaatctgcttaaaatggccaggcgtggtggctcacgcctgtaatatcagcactttgggaggccaaggcggtcagatcacctgaagtcaggagttgaaggccagcctggccaacatggtgaaaccctgtctttactaaaaaaaatacaaggccgggcgcagtggctcacgcctgtaatcccagcactttgggaggccgaggcgggcggatcatgaggtcaggagatcgagaccatcctggctaacacagtgaaaccccgtctctactaaaaaacacaaaaaaattagccgggcgtggtggcgggcgcctgtagtcccagctacgcgggaggctgaggcaggagaatggcgtgaacccgggaggcggagcttgcagtgagccgagatagcgccactgcactccagcctgggtgacagagagagactccgtctcaaaaaaaaaaaaaaaaaaacaaaatttagctgggcgtggtggcatgtgcctgtaatcccagctgagtcaggggaatcacctgaacctgggaggcggtggttgcagtgagccagaattgcaccattgcactccagcctgggcaacaagagcaaaactccatctcaaaaaaaaaaaattctatttaaacctatcctttcaaacatatttgttttgttttgtttttcatttcatagtacataagaatagcttattatgttatgcgcctttgtgggggatacttgtaaaaaaactcttttttttttttttttttttttttttttgagacagagtctcgctctgtcgcccaggctggactgcagtggcgcgatctcggctcactgcaagttccgcgcaaaaaaactctttaatgatgaggtacaagaccaccaaactggaaatagagtgcactggactacacgtagtttacgtgcagaaatttgctgaataattgaatgcaagaatgaatgaatgaccatggaagactatggccttagtcctccatgctcgctctgaaccctcagtcctccatgcccgctctgaaccctcagtcctccatgcccgctctgaaccctcagtcctccatgcccgctctgaaccctcagtcctccatgcccgctctgaaccctcagtcctccatgcccgctctgaaccctcagtcctccatgcccgctctgaaccctcagtcctccatgcccgctctgaaccctggtcacaacagcatttttttctcagtctttgctgttggtcctttctcccccaggcagcttttcctgtatgctgcgcccgtccctcatcctagttaactcctgctcacctccaggtctcacctccagcgcccctcaggctccaagaaagccctcaggactttcttgtaactggagtggacatctctgatgacgtgcactcataagatgcagatgatggccggttttcatttcatatttatgtggccaattgactcatggtcagctctcccaggaagcaataatgtacaggagggcaggagagctgtgcctccttctatctttatcattttatcccccggcaccttgtatgccttccatcaggatttgtcgaaagaatgcataatgttaagaaagcactgggggtatttacattttagttttcatgactctgtgctctgttcactagcagagagcatggcacatagcagatgctgcaaaaaaaaaaaaaaaaaaaaaaaaaaaaaaagatactgagtgcctctgtgagcagctgagcaaacgactgaattaataattgacaaataagcttaccttccaagatttctctgcagagagagtgagttagattgggttgtcacaatgccactgattctcacttaaacttcaaaaatgtttgcaatatttgagttatatcatcacaatttttgtcatatacataccagaatgttactcgattttactctcttctattttaatatacttctttaaaaaaagcatattttactaccttaatactgttatatccactggttatactgttttttttttttttttttttttttgagacagggtctggctcttcgcctaggctggagtgcagtggtgcgatcatggctcactgcagtctcaacctcctgggcaccagtgatcctcctgccttagcctaccaaatagctgggactacaggtgtgtgccaccaagcccagctaatttattatttttagtagagagggtgtcttactatgttgcccagactggtctcaaacttctgagctcaagtagtcctcctgcctcggcctcccaaagtgctggaattatagatatcagccactgcacccagctagttatgctttttaatagacaataaaataaataataagtattgaagatttaaaagatgttcacagagtacctaaaattatcttgcttatcaaaagtggctatttaaacaagtacatttaaaaaaaaagttttattcttctacctatactacctaccttccctctcccctacttttcataccccttagaaaaaggaaataggattgggaaaagttaatgacttgggggcctggggtgtgccatatgatgaagttacagagcctttaatttcttcttgttttgctgatgattatgggttgtaattcctctggccaattcacctacattgatgaatttcaggctttttttttttttttctggcaaatctggaggttaaggttggaaatcatacagacccttaaggaggaatttaacaaattggtttgagaataatggtcattttcttcaaatgtagtcttcgagagccccctgctggttgatttgggaattatcattttactacagtttttggtggggaaagggaggtggctggttttgacacgtgccacacaagacatacctaatctaccttcactgcttctcccacgtcgttttaaaattttcatagaaattctcttctatgattatgcagatacaaaatcaacattggaagtaggtttataatgaaaactgtctgggcgtggtggctcacacctgtaatcacagcactttgggaggccgagttgggtggatctcctgagatctcgagttcaagacaagcttggccaacatggtgaaaccccacctctactaaaaatacaaaaattagctgggcatggtggcgggcgcctgtaattccagctactcggaaagctgaggtgggagaatcgcttgaacccaggaggcagaggttgcagtgagccatgatcatgccactgcactcctgcctgggcaacaagagtgaaactctgtctcagttaaaaaaaaaaaaaacaaaaaaactatggaagaaacttacagaagcaatcaacaagtttatgttgaatactattcactggattcttttaggaatgcattggataaaataacagcagttacatcagtagcatttcccaaattatgttccttggaaagctaactctggtagacagcacctttcccctaagaaaggttactgtggtcaaacgcgtctgggggaaatgctacatgttaagttctcatggagagtcagaaaacaaatcaataatttcagggctctgagatgccctgcaatgaaaaacctgattaaacttgtttaaaccaaagctctgcacatctatttggacatgaaacttcttttccttcttgttatatgaataagcattcacgtgccaccagtgcagtgctgaaatctcagatttcatcattacgagggagacaagccatattcaatggggtctttctaaaagctactctttctgaggacctactgtgtaccagctttccgctgggacctaacatacatgatctcatttagatcccaaaacagctgcccgaaagggtattttattctcatttgctgttaggaaactgagaatttgaagggttattaatgggtccaagactacctatctagtaagtaacaaagattttaaggtttttctctctcattcttccatccatccattctttgtttactcagtaaacgtttattgagcatctagtttaggccaagcgctgtgctagatgacagacatacctgggactcctaggcagggatattccttccctctcggagcttataatctaatggagagtcacaatccataatcaagcagacatagttaatttcagatttggtatatggaacagtggaaaagaaagtttttatgataaagaaagtgaggcagagctgttggttttgagaagatgctgacaaagggacttcttgagatggggtagtcagtggaagcccctgcaacaccccaagaccttaagtctaaaagaggcagccataccgagagccaggggaaggcattctccatagagaggtcagcaaatgcaaaggccctgagtcagaaatgagctgcgggcattcaaagatcaggaaggagccagtgtggctggtgcctaagggacataaagagacagccggggtggtgaatacaggtaatcaagacttgcttattctaagtgtgaggggaagcattagagggtcctcagcatggcagtgtcagatttaatcgatattttcattcaagggattgcaagagaacaggagaggaagtgggagactagccccaaggccgttgcacatgagcaccggagtgtctggcctcagtacaatgttcctctaactctctcacctccttctcaaagttatcatctcagcaatctttacccttaggccaaggtgcttcattgctccagtgttttccgaactcttctgtgggaattgccttggaagatagcatcactgtttcaaaacaaaaacaagaaaaactaggcacctatatcatagatcggacctaagataatttgaggaaatcaaagagtggcactaaacagttgtgtcactgaaccaggcgtcttccatgtagccttatggggttctcctgacaaccatgggagttggtgagagtgggactatggtctccatttcaatgactgaagaaacagagacctttggaggttaaggtcttactccaggccacatggctggtggatgtaggcgagaccccctccctacaaaaaatccaagaattagtcacgtgtggtggcacacacctgtggtcccagttacttgggaggctgaggtgggaggatcacctgagctcaagaggttgaggctgcagtgagctgagatcacgccactgcactgcagccggggcgaaaaaaaatacatacaaataaaataaaataaaataaaaacaacattgttttgaatgtgtgtgggtggggcggacatgctccactggctgcaatcctgtttcttgtgcctgcttgatccacacatttactcaccaaggctgcggaagtttgttccaaaggctttgcggtgagtcctgagatcttcacctagccgtgtacatttctttgcttgcggtaaccgttggccagcaggtggcagtagaacctctagtttttgttaaatcagggacgcattatctacagggattggcaaacaatggcttgtgagccagatccagcctgctgactattttcattaataaagcattattaggacgacattcattacatattaactgtggctgcttttgtgctacaggcagcagggctcagtagtcgcaatgagaccatatggtctgcaaaacctaaaatatttagtgtctggctctttctagaaaatgcttgacaacccttatattattaatatgtcacaaagggggctaatagggatcttgtgtgttgccttcttgactttttaaactctgtttggtctgaaatctaaacctgaaataataaaggctaaatgaattttaggaagttctccttaacatttacaagattaccaaagtataagcataagactgccttattgctgctcaggtttccagaatattctagctaaaagtttccatagttctgtttctatctcatttctcctgaataccctggatatggggattgatgcagatgaaaaattaaggaagaaaataattgctaatggactgaccatggctcagcccaaaggccacatgcaaatgatacgtaaatcatgcaatctctgtgactcatttacatatcatcctgagaggcctttggaaaaaattctgccttaagtacatttacttatttctgttatagagaaagttgttgccacctaatttgattgtgggctttcttgaaatgtaactgttgattttaaattctttttggaaaagatgtttccagccctctgaagcttcatcgaacagagacttttccagcctacagatctgagcactgacagtaactgccaagaattgttaacacacttgtgatgtgtcagccacagattcacccaggaggtcacagaatgacagcaagggaaatgacgaccaagagaagaagcttaaagtcctggctaattgtgtggtcattggaaaactctgcaatacaataattttctttattttctttttcttttttaaattcttagtgtaattgaaacgtgctctatagatattgactctgtgttccctcttttacagctggacagaaagaagtcaatgtcacgaaatgattttctattgtagatactttgtcccttgcacttctctgaatctgtccttttgtggattcttgtgattttccttccaagtgtttcagttgtatgacagtcagtattgacaataaaatggcttttaattatttgttatttgtttacaccctattcctcagttattattactgtggttctgattaactactggaaattatatttgattatatcaccaattagttaaatcagtgcttcgactcactcttatctgttctgttcaaaactatttgttcaaagaacccgttagtgttgtttacagggttacagtttctctcacatgctttcctcacccctttacccccctttttgaaagcctttattttgttcggagtctcttcataaaacatttgaaaataaaagatcattcttcacccatatgttctttggattctggcaacatgtttttctctatcctaggtatttctgaagggtgtgtggacattttgcatgtgagctgtgagtgtattgtgtgttgtgtctaatatgaatccaaccattcacgcatttgctcactcattcattaatgtggtctgtattgagcatctatgagtttccggcactgtactggagttcagggatgtagaaatcaaaagacagtctttgttgccaaagaccttaattccagaagagtgccacaagaaaatcaagttggaaatatcatacagtgacacctgccaaatgggcccccagtggccatgaacttctaaagagaaggtcagtgctggatgtgagttgaattttgtgagcacctaaagttagagttcctctaaagctgcagagcaagcagggatggcgcctgcctggttcactactctttgccagataaaatacaggatacccaattaaatttgaacttcagataagcaatgcatagttttatagatctgagttagctgggatttcctagcacactgctgctcaggatatgttttttaagcggttgagaaatactggggaaaggattgaattcaactaacaattaattagtagattagggtatataaattgtttagtgctaatggcttccccgaaatgcatgtgtgttctctctgggttctctgtagctacttttcacacaattttagctgatcctacttctctcaggggtcttcatttttgtcttttaaaaatttggtttgccaggcacatttgataattacttcactgttcattttcctgactttatctggttcttatttattttctttctctaagactgtctcatcagagattctccatgattcccagggccttggcagccaatgggagaattacgttgaagaagtagataaaggaaatggaattaaagaaataattataattttaatgaagttaaaattactgaagcaagcctcaagctaatgagtgtgaaaagaaatgttgctgaatgtaggtaactagaagtgagaacctctttgaggatttttaagaaaagaaacgtattgacagaaaagagcattcgattcggttatgctatcagcttttatttatggccgggcacaacgctaagtgcttttgtggtattatctcaatcgccccaatagctccatgaggtaagtataattatcttcattttacagacggggaaaccgagctcaaggaatctaaatgatgtaattaatatgcccaagatcttttacctattaaatgatagattcatgtttgaactcaggtaatctgattcctaaatctgctttgtaaatccctaaggctggcttccttaggggaaagcaaacttattctgtaaagagttgagatgcaaatattttaggctttctgggtcatatggtctctgttgccttccggtgcaaaagcaaccatagactgttttgtattttgttttgttttgttttttgagatggagtctcgttctgttatccaggctggagtgcagtggcaccatctcggctcactgcagcctccctctcccaggttcaagcaattctcctgcctcagcctcctgagtagctgggattacgggcacgtgccaccacgcccggctaatttttttgtgtgtatttttagtagagatggggtttcaccatgttggccaagctggtcttgaactcctgacctcaagtgatccgcctgtctcggcctcccaaagtgctgggattacaggtgtgagccaccgtgcccagcctgcttttaacatagataaacagataggcatggctatttcaattaaactttattcacaaatacaagtggcagagttgactcttatttctggatcccctgctctaaaataaaaacctcaaatgctatcttatattaatttcacagtttcaggtagaaaacataagaaatttaaatactttactatctggccttaaataaggggagtgataatttgaagtgatttcgatttttttctaaatccctacctcaagtagtgaacatagtgtgagaaagtttttcaaagctgtggtggatttttacctaatgcacactaaattctaaagcattcgtggtaacttgcaaataaactggggtctggaggctaaactatgatgtttctgttttaattacatattagaaaaagcaacttttttcttttggtgggaggtgaggatgggggagcagggaagtaaatctcatattcctctttgcatcctcaactctgttaaaaatatctttttttttacccagtttaaggcaggatattgcagtagtgattaaaatgctctcaaggaagactgcttgagtttctgaaatttattcattcattttccaagtacttatttaacagtatatatgggtatgccaggatgtatacaggaaaagtgtgtttgccttcaccatgcctgatccacagactcaatttgtaagccaattgctcaggaaacagaaaaactaacaagaacatacatttgtatgagaagacattttattatttcttctttgggcaatcttgacttttgagaaagagaatactttatgagcttgaaatactgtataaactatattaaagaaaatctttcctttggtcctggaaaaaaacacatagatgttcagatttccattaagacagcaaactggaaatttccctttgatattcaggttttaaattctgtagattaaatactgggcaaaggtaagtctgcccatcttctcatgaaaatcaacagttggctgatttcactgcaaactcattggatcaatctgttgtgatttgattcagccaaggcaggaccaagtgataatcttttgcctggatctgcactaaataaagtaccatcacccacactcccctctctaagctagcagttcttaaatgttggcaaagacacttattcactagatctagggtggagtccataaatttacattttcgatcagtgtttctaggtaactccagtgcaggttttggtaaatggcataaaatctcattttaagaaagctcaaggagacagaaatgcagggagtacccatcaggtaagacttgaggcacctggaggcaattgacaatgcgcttttatccaagacacctgtgaaaagtcaggtggtagagccaagccagtgcctccattcgagtgggctgcccaagacgcttcccttgtcaggagatgcagaattctggcacacaggtaaagacgcgattccgtacctgggataacacacaggaaggggagatgtgctgtaattgcagctccagaggtgggattccaggaggcattttcaacgtcgctgcaatagtttctttgttgctataacaactaataaggagacttggtttgaccttctttgtttctctgagatgcctgaagtttgaggccttcccacactgttttttttaataggaaagagccgccagccaggggctgcttgtgaaagcaaagcagagactgcaaaaaaggcaggcagggtgaggaagtgaaggaagcgagaatccagctgctctagctcaggcatcagcactgagccaccagccaacctgtcttacttcctttctccaagttctttcatttttattataataacaaatttattatctttggcctttggtgaggctgctttctgtcctctacagaaaagcaggagttgcttagggggatttacagatattgcagatgggtaatgctataacttggctctgtgtccccagccaaatctcttgtcgaattgtaattcccagtgttgagggagaggcctcgtgggaggtgattgaatcatggaggtggacttctcgcttgctgttttcgtgatggaattctcacaagagctggttgtttgaaagtgtctagggcttcccccttcactctctcactctctcttctgccgccatgtgaagaaggtgcttgcttcctcttcactttccgccatgactgtcagtttcctggggcctcccagtcatgcttcctgttaagcctgtggaactgagtcaattaaacctcttttcttcataaattacccagtctcaggtagttctttgtagaagtgtgagaacagactaatacagataaggtttagtattttttgtttgaaaagccaaagtttacatatataaaggttatatgtaaaacaaaaatgagtggtgattgagttttatgcctctacaaaataggttgtgaattaacttcaacatctgttgaaatgcatcaactgggaaatgtccacctccttaatacagggctcaaataagaataataccttgggataccacaacatttacatttgataccccctgtgatcttagaggaagctactatacctaaaacaattatgccttcctttaaccatgaacatagtatcatttttgcctgcattctctataaatgtacccattgtgcaaagatatcccacagtggggatcgattccttgacttaatgagtcatgtattaaaattaaatattttccattttcaaatgttcttgacaaatcgggaacccctggacccactagtttaaataagttaatatggctaaacataatgttttgcaatatgtaaatgttttgaaggttattgggtattccatttcatccttttgcgagttttagtagattgggtctttcaaggaattaattggtccaactgatctagttatcaaatttgtgggtatggagtttataatcttctaatttcctttcagtgtccatgggatcggatatggatggcctggcttttatctttgatattagtaacttgtatcttttctcttttatcttggttagtatggcttatttatcaattttattgttctcttcaaaataacagcattttgaaattatgtatttattttagatttagggagtataaatgcagttttgttgcctcactattgcgtagtgctgatatctgggcttccagtgaacccatcattcgaatagtgaacaccatacccataagtaatttttcaaacctcacccacttcccaacctcccacttttgaagtctccagtgtctgttattccaccctgtatgatcttgtatactcatttttagctcccacttgtaagtgagaacttgaggtatttgactttctgtttctgagtatttcacttaggataatggcctccagcttcatccatgtcgctgtaaaagacataatttcattctttttaatggctgcatagtattccatggtatgcacttatataatttatttttattctttatctatgtgatatatatgaatatatatgtatatcacattttctctaatcatctgttgatggacacttaggttgattccatgacattgttataatgagaagtgctacagtaaatatataagtgcaattatctttttaatgtagtgatttcttttcctttgggtaagattccagtggtgagattgctgaatggaatggcagttctattttgaattcgagaaatctccacacttttttccatagaggttgtactgatttacattctcaccaacagtgtataagtgtgtccttttctttgcatcctcaccaatatctgttgtcttttttttttttttttttgaggcagagtctcactctgtcacccaggctggagtgcagtggtatgatctcggctcactgcaacctccgcctcccaggttcaagcaattctcctgcctcagcctcccaagtagctgggattacaggctcctgccaccacgcctggctaattttttgtatttttagtagagacagggtttcaccatgttagccatgctggtctcgatctcttgactttgtgaaccgcccgccttggcctcccaaagtgctgggattacaggcttgagccacggtgcccagccttgtctttttaataatagccaactgactggtgtcggatggtatctcattgtgattttagtttgcagttctctggtgattagtgatgtggagcattttttcatgtttgtcggctgcttttggttgtcttttgagaaatgtctgttcatgccctttgcccactttctaatggggttatttgtgttttttctttttgagttggttgagctccttgtagattctcggtattagccctttgtcagatgcatggtttgcaagtattttcatttaagctctgaattttatcagaccatgactgctcctctctgtgtttctatgctacatttacatttgcttgtttacatagaaaaccctaaaaggccaaagaccagatttaattgtttgtttttgtagtagacagttacctcactaggcctacttctgtagcaagacagatgaggaacaatggaaggcctctataacaaaagtcttcaaactctggtctgagggccaaagccagcctattccctgctattgtaaataaagttttattggcagacagccatgtccatttgttaaagtattatttgtggctgcttttgtgctgcaccaatagacttgagtggttgcaacagggaccgtatgccctctgcagggcagtttggccaagctctcctctatatgatccccaccctcaaacgaaccaatggatcatccaggctccaggctgctgctcacatgtcttgccacatgtactacttgtgaaattaatgttctccctgtaatggaacatttagccatttcctgaacagggcctgctccctctcactgcaggagtcattgtatcttctgtttcttttgcctacaaaaatcctccactctttcaaaagtgatactttctcagacttcaacttaagcaccaggcacccagaagtcctccctgagacctccaagccagaggaagaagaagtggccagctatatggttttattttgttttgttttattttactgtttttgagacagggtctcactctggagtacagtggcacaatcatggctcactgcaacttacacctcccaggttcaagccatcctctcatctctacctccagagtagctgggaccacacgtgcatgccagcacacctggctaaattaaagaaaaaaagtatagatggggtctcgctgtgttgctcaggctgatctcgaactcctagcctcaagcaattctcccaccttggccaggattacagggatgagctaccgtgcctggcccagctacatgtttttaaagtactctgaacactgcacatgttgcactcataactgttttacatttttgtgcagtggttgtgatctctgctgtctccatgcctctgcaagctttctgagggcaggtgctatatctatttggtttagctttgtaacaccagcagcaaatgaagcgcctaattaatctagcagatggcttataaatattcatttcataagtaaataaatggaaagtgagatagcaatgaatacattataaaatcatgttgtaaggcagagtagttttttcctcagataagtcatatagggataagtgctggggatgtacgcgctagtaccattcctggaactcccaccatgtgctgcaataatgcttaacaccatccctgcaaggtgtccccccttttagcccctactactgcgtttcatgctgtagaatctaaagcagtgacacttaaagcaacttggctccagggcttagaagctaggctgcaaatccaggagtctggctctagagttcacacgcttctgtacttttgattcctaagtggtgtgccaaggtaccccagaagaccacagtaaactcacagagatgctgtggatacattcatttttgcaggaaatagcgattctcaacatctcttggacccttgggaattactggcttgaggatgttcagttttaacatgatatcacacgaaattcattttcatgataccacattttttgtgaagctgggtctttggccgttgttttgattaaaaaagcaaatactctgtgaaaatcaatgtggatcaggagatgaggggggtggtgtccaatctgattcccaggtttgagggaccacaatgctcaacacacacacacagagacaacatgaacaagtaattatagttacttaggaatgaaatacaagtattttttcttttgacgtaggtgttgttttaatggctaccaatgtatcaggaaataaatactgattacattgtttggatttaacagcttaataaatggaactgctagatatttcttttggcctaagagtactaggagaagtatcactgtgacattaagggcaccatgaacagggaaagcaggaaagctcccgctctgcattgccttctgcctggggacagccctgagatgcaggttctgtggcttgagtgcctagccctgtataggacacacaagcagggctggtttcatggatgtgcaacccaggcagctgcacaggtccccatgctcagaagcgtcccacacttgatttaatgctctgctgtaaccttcttgaaattctcagtgtttccttctttgaacttgtgttttataagtaaagtctgatggaataatggagcctgcctgtgagcagaagagatatctgcagactgagtgagcgccttgcagctttatttgcatgtagcattcacgatgccccatgaacacagaattccaggggacctgaggtgcgtggcagtgagtcccaacgcaaatacaaactatgaaaggaaaataaatcttgggacaccaaaatcatgaagccaaagggaaaaatagtcaggctgggaactgcttagggcaaacctaacttccactctatacctaaaatgatagctactaagataaaacagctgcatacttccctccctaggaatttccttgtggacaaaagatagacagaattcaaagtcatccctctgctcactgagataaacgcatatctgatggcctcctttggaatggctaatcagaaactcaaaagaatgcaaccatttgtctcttacctacctatgacctggaaggcccctctccgtttcaagtcccacctttccagactgaatcagtgtactttttttttttattttttatttttatttttgagacagagtcttactctgtcactcaggctggagtgcagtagcgcactgcaacctccgctccccgggttcaagcaattctctgcctcagcctcccgagtagctgggattacagacatccgccactacgcccggctaattttttgtatttttagtagagacggggtttcaccacgttggccaggctggtcttgaactcctgacctcgtgatccacctgccttggcctcccaaagtgccgggattacaggtgtaagccaccacacccggccccagtgtacatctttcatgtattgattgatgtctcatgtctccctaaaatatataaaaccaagctatgccctgaccaccctgggcacctgtcatcaggacctcctgaggctgtgtcatgggcgtgtgtgctaaactttggccaaataaacttcctaaattgagacctgtctcagatacctggggttcaaaagggaagtatgtcacctctgtcgctgagtaagaggggccacggccccgaagcggcttttcctttgaatcagagcttgcttcaaatgcagaaagaaggcaatggcattctaagaaatataaacatctgaggaagcctatttcaacctttcttacgtacattgcttcctcgtacaacacagaaggaaaagcaaatctggagcaacccggatttccttccttgttcatcagtaagccagtggtagtgttactggaaaagggtcccaatccagacccaaacagagggttctcggatctcacacaagaaggaatttgaggtgagtctataaagtgaaagcaagtttattatgaaagtaaagaaataaaagaatggctcctccataggcagaggagccctaagggctgctggttgcccatttttatggttattgattatatgctaaacaaggggtggattattcatgagttttccaggaaaggagtgggtgatttctgtaactgaggattctccccttttttagaccatgcaggggaacttcctgacattaccatggattttgtaaactgtcatggtgctggtgggagtgtagcagtgaggacgaccacaggtcactctcatcgccaccttggttttgatgagtcttagcccgcttctttattgcaacctgttttatcagcaaggtctttatgacctgtattttgcagacctccaatctcatcctgtgacttagaatgccataactatctgggaatgcagcccagtaggtctcagctttattctacccagctcgtattcaagatggagttgctctggttcaaatgactctgacagtggagtgtcggtagaatatgcatgtatcaagtaatgagatgcaaagaagtggggtagttctatgcagcatttctgctgttttggcaagaagagaacacataagcaagtatatgagctaggaaaaatgagctgtgtaattttcgtgattcagcacatgaattacatgttcttatattaacatttagaaaggacattatacaatataaaggtaaatggtgaaattcatgcccataatttaaaatttcagttttttgtttttacttatgacatcaaatagcaataaaaaacctacaatgacaagttgagaggaagaaaggaaaaatgtttgtattttagttcctttgacccactttttttcctgcttttggaacaggaagttcacgttttcattttacactgggtctcctgattccgtagccgccctgtcctgaaggtgccccttgagaagaaggcaactgagcgggactggggattgttcgttgactttttctgtctcttttgtgcttcttcatgtggctcccacccaggactgatgctcgccttttaaaactcgcagtccagtcatttaataattgacctcggttgaggacagaagccacagggttcctattttaatcaaatcctcaagccagtcacagtgactgcacagagctaaatgctatagaattattttcctcatcactgaattccttttagagttgtaccttcagaacaaagaaagaaagaggatcatttggttatcaaagggagccagccccccaatttattttccttcagctgtcatgcaaatttcaagcggagccctagcaggatggctttgaagataaagatcacagtgccgtccgagggaggcttcaatagggtttctgatgatcctctgatttacttggagaaggaagaaaagagcagacaacaataggaagaactcagctctgaagacataaaagccagtgtctaattctggtcctctctttgcctggaggaaatgtcagttaatagtgagagggtcagacagggctagtctaggatttccccaaatgtgttccatgagatgccaattgaggttcctaagacggggagaaaaaaagtttgttcttaagtgaatttttggtaagtgttgagtcaaaccaagtacttcgcagagttgttggagccttacatttagtaaacagtaggtccaatgcatataaaagatgcagtgtttttcttgcaaccaatttgactggtggttgttacatcagtagtttcttgtttcctgttgggactcagaaaaataattaaaaataattcagtagcttccaataactaggaggtgaggacaggcctttactctcaaacatggccatcaattagtggtttccagtgcaaaatgcaccacatttccagatacttgctaataaccatttgtcagcagacacaaagacagtgatatgggctgagcagtgagctctctgtactttcagatgttctgcttgcattgcatgggaaagatttcttgaggccgataggacaatattctggcagtaacattcagctgagtttccagctggaggtggaggagttcaaatgaagaccagttgggaattctaagcttgtgagggcaccattttgcaagtgaaggtacttgctggggcccgcaggagctgtactccgtaatcccccaaagaatgggaatgtccacagtgtttctagctattccatttatccttgcataccctttattcaccaagagcgcacttctaaaacccactttttcattaacaaacttctggtgttgacaaggaataaaaatagcagaagccacttctggagtaaggagttttgattcctgtgtttcgtttgagtttttcttttaccaaatgccaactcacaactcctggaatgtaaatttccaattagtgtctttgtcgtctttgctattttaaactaaattgtagatcctagaatagtttttgaaacattggagaattcttttccttgaaatatcttttagggttgagattccaaggacgccactttaggaactgttgtgtgggaggaaagacttgtgctctgagagacctctcagttataatgtggttgtgttacattgatcgttgattgttttctcagcttggtagtgataataactttttaaatgcctttcaaggagctataggggagaaaaaaaatctttcttcacttatcactaggcttatggctcagacccctatgacaaaagacagattagcaagagaaaagcataataaatatatttaatagaaacgttccctgacatgggaaacttgattaataaaaactcacagacccagggaaaactatttttacagatagtaagaagtatgaatggaggacaaaagggtgtgatccaatagtaataaactcaggggagcttagcaaggcctgtttgttccaattcttcttggtttccctgtgtgatgttccttccctctgggtatagggcaggacatctgtcacaagaggattttcagggcagaagagaaggagaaggtagagactgaccttcctggattttatggccctcagagaagaagggacaaggggaatgttagtttctatggcctgctttagggtagaaagtgacaagagaaggtcagagagatctttctgcttctgttcttttttcaatatccaaggtgccagattttggggttaccattttgtacaccccactagtactataagaaagagtcatggctgggcgcgatggctcacgcctgtaatcccagcactctgggaggccgaggcaggcagatcatgaggtcaggagatcgagaccatcttggccaacatggcaaaaccttgtctctactaaaaatatgaaaattagctgggcttggtggcacatgcctgtagtcccagctactcgggtggtggagacaggagaatcgcttgaacctgggagggagaggttgcagtgagctgagatggcaccactgcactccagcctggcgacagagcgagactccgacacagcaagagtcagaattggaaaaattccataggtagctggaatgcagggtatctgatccaatatcatcatctgtaaaatgatagctactattctatctcagaggctagttaagatcaaatgaagttatctgtatggaaattctttggcaattgtaagatgatcaggtgtgaggtgcttttatggttcgttccaaatcaaatgcctctcctcatcatgtcatgcagactgaaatgaaagagtatgtataaaataaaagatgctcatggtcttatacgtaaagacacccataaattccatgttgtaggggagggacaaagggaattagtacttactgagaaggcgctttgttccagagattttttttttttaataatcctacttgatgctcatgtacgcgtgagtattttattttcagaggaggaaattgagagaggggggaagcactcaaattttgatagccaggaagtaggaatggtcttgaattgagccagtcagaattctaaaactggcactatttctaccacactgtgaaatctcgttattctacttggccttggtgttccttgctgtacaatggggcaattctggctactcccccagagcatgctagtgggaaaaataagtgagtttttcattatgacaactttggcccatcattttttaaggccaagcatctaagtaataattgagccatccatcagcattagtaagaggcagaatacttttttttattttaactaagaaaattagttattcttatatttcaaccaggggccaagttcaaatgcgtatggtggctgggtaggaaatggtccacgtgtgaggttgggcctacctggagggcagtggggtccatggagactggggagcagagcccctgtcgaatgggcaaattcactcaaatccggccaaatgaggctatatgggaatgtggggtcccaaagtttctaaatcttcagtttttgtttttgtgtttttgattaattagaagctagaacttctagtgtgtgcaatgtcccagtttttaagaattgaaactaatgaaaaagaatcttgtgttggttaataccttgtaggtcagagaatagaagaaaatgtcagtgagccaaaatcagcagtaggccttccatttaaaccctccaagttaaattgggttgctatggagattgttaattgtatattagccattaataatattattttataagtggagagagacaaagtgatgcttgtgtaacatggtggcacctactgaccatatgattcccagggtagggtaaggcgatctttcttccattaattctgcttttctaatcagttaatatttttactccttttttttttccctgagactttaaagctctgaccccttaattcatcttctttagcaccaacagtgtggggagtttcataatagcctgacagtccagtaaatacctttgtccagatgttactaatagactgatagatgtgaaacttgatcacagttatctggaaagactgaaaatgccgtgaccttagtctttgcatgaaggtcccttaaaatagtttttggtttttggttatgaatcaaccttcttatagaaaaccaaactgatggaattattgcttttgtgctgtaacattatttgatatgtaacatctaacatctgtcaaaacaggaaagttatctcttcaagtggcagcagcagattggatgcaacatttaagcaatgacaaatggttgttgaagtcaagtgacttagagaaagaacttaaagggaaatagaaaatagagactttcctcatgggaggttgtgtccctgaaggttaaaactatgtgtcatggaattcagattcagacctaagtctgaatctcaccttctgccacttatcagctgcataagtttagataagtaactttaactgttgtttgtttcctcatctctcagataattaaaacaatgcctaacttagaatgtgtttaggattacttcatgaaataataaggccctcagataggatctttcatagaattggtctcaagaatgttatcggttttgaaaaaaatggctattgatatggtttggctgtgtccccacccaaacctcatcttaaattgtagctcccataattcccatgtgttgtgggagggagctggtgggagatatttgaatcatggaggtggtttcccccacactgttcttggggtagtgaataagtcttagaagatctgatggttttataagggcaaactcctttcattgcttctcattctttcttgtctgccaccatgtaagacatgcctttcaccttccaccatgattgtgaggtctccccagccacttggaactgtgagtccattaaacctctttttctttataaattatccagtctcaagtatatcattatcagcagcatgaaaatggacaaatacagctatgtagcgggaaaaaaatctcttttccttacctgtgctgaagttcatggctaagactcctgtcacaaaagacatattaacaagagaaaagtatacaaatttatttaatgtgacacaagaggcttcaaaatgaagaccttaaagttttacatgacacaggagatttcaaaaataaagattttctagaaaaaggaaaacctgtatatttttatggacagtcacatagaagtataattggaagaaaaatgtgatccaatggtaataaactgggaggaacttaggtaggcctctttgttcagattcttcttggattctctgtgtgacatccctcctatcaggtctttgagggagaagggaaggagaatgtcagtgactttcctaggttttatgtcctgtttcaggaaagatgaggtggaaagtaagagataccttcctgcttctactgttttcacaagtgctaaggtgccagattttggggtagttttctgagcaccatcagttatcaattttgaggattgatcaatagtgaagggttcctggcttcctaaatacttacttcctatactatgtcatttcaatgctaaaaaattccaaatcagataggataaaacattggcatttactatcataatgctcttctaaacaatcagcttcatagagttctaattgacataatatctggtcttttgtaagtgtagttgaggagttttggcaaaggtacacagtgacataaccactgtcacaaacaagatatcaagatttagatcatttcatcacctcaaggagtttcctcctaaatcttcataatcaactccccccaccctttggccttaggaaaccatttatttgctttctcactcaattgttttgtcttttctagaattttatatagatggaattatacagcatgtactctttttaaaactgtggggtgaaatcaatttaatgtgttgcaaccatcattctctaaataagacagaaaatatcagagtgaatcacacttgataatggtgagtatgttttgtgaaactttgttttcagtgtgtatctcttcatgtatatttctctgtgtcctgaatcataatataagctctattcatcactgataaatggaaacaactttcacctattatttgagccagtttttttttttttttttttgtccagaggactagaaattggaatgacaagagctgatatatcattgtgtgttctcctttgtgccacagaaggtgatgaggaattatctcatttaatcctccctacaagcctattaggaaagcacatctgccttttacaggggaggagcctgaggctcggggaagctaagttcaagttctcataactggtgagaatagaagctaaagttgaaaccatgggcagttaagaagcagcctggacatgtggctgataagactggagaaggggaaggattggcatacaaatataactatgtattctcttggctgttattagattatcaaattgctaatggacaagtactaagtactaaatgccaatcccgccacaggatgcggcaagtcagagcaggcagaaaggtgtgttttctgcccacagataggatataaagttgtccagaactgggcagcaaagagtgtgggcttgggtgatagacccggactccagttcctgttctgctgcttacaggttccttgacccttagcgggacctcggtctctctgaggttcaggttcctactttgtaaaatagtgatttgtaggactttgtgaggagtcagataaggtgggctttctccccctcggcattattgatcacctgagctggctcattctctgcggcgggggctgccctgcgcactgcagggtgcttagcagcatctttggacttcacccactagatggcagtagcacccccaccaggtataatcaccgtaaacaaaatttccccagttgaaaactacaaaaataactcatgaataaaatgtcccttcccggctggctgcaatggcttgcacccgttgtcccagctactccagaggctgaggaggcaggatggactgaacccaggagttgtgagtcttgcttgggcaacatagtgagaccctgtctctaagaaaagagcaagaaaaagaaacaaatacagtgtctacatctacaagtcacatggacaaatgggatcatatcaagttaaaaagcttctgcacggccaagaatccccttctcttttaccgtcataaaatgaaagttctgtcgcatatcagcagataacagcagatggaggagtaggggaccagctgcccaagcagcaaatggacttcggctcacatggcccaacatctctgggggatctgagtgaggcagcactgagtcctggtaaggaggttgtgtttcagagccagcctgcctgggtttgggtccaggctctgctgcttctactgttaatctttaggtaggttaaacaatttgcatctctgtttcctcatttttaaaatgggaatagcaatcatcccttccttttaaagttcttggctgggtgtggtggctcacgcctgtaaacccagcactttgggaggccaaggagggcggatcacgaggtcaggagatcgagaccaccctgggtaacatggtgaaagcccgtctctaataaaaaaaaaatacaaaaaattagctgggcgtggtggcgggtgcctgtagtcccagctactccggaggctgaggcagaagaatggcgtgaacctgggaggcggagcttgcagtgagccgaaatcaagccactgcactccagcctgggcgacagagcaaggctccatctcaaaaaaaaaaaaaaaaaaaaaaaaataataataataataataatgttcttgcgaggattaaatagtgtaataaatgtaataaatgtaaagtcttcaggatagtgcctggtacagggctatcactcaataaacattagtttctattaatgatattattttagataggttcgaagccaatgctgcataaagattgttctcaccatgaccaacttatcgtagctttccctggactttcctgcttatagcatagaaaatcccaaggctggggaaaaaacccttgtactgggcaaactgggacacgtggtcgcactagtcagatcccagtacaacagtcaatattttgttgcgtcctgtccatagttttgtccacaaacactgtgtgatttcattaccaagacttgtgctcagtatttacaataacaaagatacaaaatcaatgtaaatgtccctcagtggatgaatgtatcaagaaagtgtggaatatatatatacgatgtaatattgcttggccctcaaaaagaatgatggcagggcgcagtggctcatgcctgtaatcccagcactttggggggccgaggtcaggagtttgagaccagcctggctgacatggcaaaaccccatctctactaaaaatacaaaaattagccttgagtggtggtgattgcctgtaatcccaggtactcaggaggctgaggcaggaggattgcttgaacctgggaggcagagtttgcagtgagccgagatcattccagcctggggacagaggagagcgagaatccatctcaaaaaagaaaaagaaaaggaaaaaaaatcatgtcatttgcagcaacatggatggaactggaggtcattatcataagtgaaataagccaggcacagaaagacaaatatggcatgttctcacttatatgggagctgaaaaattgatcacatggaggtggagagtagaaagataaatatcagacagggaagggtgagtgggattggggaggaggatgaagagaagtgggttaaagggtacaaacatagtaagatagatggaagaaattatttattcaatagcagagtagtgactatacttaaaaatgtattgtacttggataatggacaccctgaatactgaataccattcataactacacattatatacatgtaacaaaattttgcatgtgctccatacatgtgtacaaataaaaaatataaaaacataaacaattggaagcttataaacaaagaattgtgctcagtagcaagggttccatcatgctcacggtcctataggagaggcagcaatcagctgggtttgggatcgccaggccagcagagcagcaagaggcatcatgcggcatacgccgtgtttctattgagggaacagtacttcaggtaaacatcagcaagccgacaagatttctccagggagaagttgatgtgaatgagatacctattttaatggacccagaaaagacaactctattgtcttacactagaaaacaagtgatttgtataaacgaatgcagcctggggaaacgggtgccacagacttattagctaatggaaagcgtaattttatatctacttctcagttttcccaggcactaacagagggcagagtggcttggattatcttgcactggtgaaaatctaagaagtctcccagttttctgctaggctgaaactttcctgatctgagatcctttcaaagatttggtcgtgcatttagagaatcattttgctttagataaattatggttgttgaagttgacgctgctgaattgcctatgcattctccatgttctttcttactaacaaccctgattttgtttggggaagcaattattctaattgaaaatacttttccagatctggggtatcctgggactcaattacgtccaatgagatataagcagaagtctctgcagaagacgtccttccacccctctcctccctaaaaagcttctagaagtcaaggtttttgtcctccgtccttagcactctcccctgcatcttgcctggaatgcaaataggatgctcagaggtggagaaccttgcttccgcgaggagcaaagaggcttggtaatgatgccagagaggaagtcagcaagagtgtgggtcctttatgactccccatgagttgctgtaccaactgcgaatgaccacatctggacctatgtcatagaaaaatctcctgtttggttaagccattatagatgggtttccagtatatgcaatcaaacagaatcctaacagccaataggggtttatttccatggtattttgtaaacattgtgaacagcaaaacctggcagatatgtggatttagaacaggttttgtgtgtgtgtgtgtgtgtgtgtgtgtgtgcacggttctttgagtgaatggagtttttacacaccagtgtcagggctgccttctctgtgagacacagtaagtgcggtgcctggaacctatgatactttttcttttttgagataggatcttgctctgtcaccaagcctggagtgcagtggcaggatcacggctcactgcagcctcaaaatcccaggctcaggcgatccttccatctcagcctcctgagtagctgggattacaggtgcaccaccatgcccagctaattttttattttttgtagagactaggtctccctatgtttccctgcgtggtctgaggtgatcctcccacctcaacctcccagagtgctgggatgataggcatgagccactgtgcccagtttcatggtacttttaagatccatgaaaatgtttttactttcttctaaaatcagaagaaaaaaattcattttggattttgtctttataccaactcagccatataatataattttaaagaccttttaatggaaaaaggggcccataaaggcaacagtatttatagcccatgaatttatacagcctaggatacctcctcatgtcaaaaagaaattggtctcatttcttcttgttaattttccattccaatttcttccttctctggataaaggaacatatatctgcattcagcagaggaggtgggggcactggaaaggcttcagcctttgacagagctgggtttgaaccccggcatgactacacaacttctttcatttctctgggtatcagttttataaaatggattgattaatatcatgtatttaatcaacaacttgaatgcccgtgatgtagaagtgatttctgtagtggggtagcactcttatgaggactatagaaattgatacatgtggaacccaatatttggctcatgtttgacactcagtaaatattgtttttttaaatcaccttccatttggttgtgagttgcttgcctattgcacagtccagttaccttctctactgctgtgtggaacactgggatcaggaaggtggcttcctctaggaatacagtcctcaatctttgcaaaagagcgatccttttcacttgcgtgtaattaagaccccatgcttcttcccacagtcatgaccatgagattccatcattcctctctaatgactttgttctgtatcactgtttgtaaaatgcattccccacacacagcaatcagagaacagtgtaacatcggttaattcaaagacccacttattcaactctcattggaagaagctgtcaggatttcaaacatggttttttgttgtcgttgtggggatttttttttctgccttattataactcccttgaagatcaatctgtgaaaaaaatcaattggttattagaaaaatgcacatttccccattataatattatactgtgcctcatcagagtgcactgaagattttgtagtacgttataaaagtgccaaatataatttgtatgtaaatgtcttatgtaaagtcttacttttatttttctaccgcatacggaaaaacacaccaagtgaatttgaggcaaacacaatgatagatcccactgtgataagaaaacaccctaatgcaaagttgccagtaggaaagaagaccctttccttgtgttactttgtttagagcctgtttgagaaatatcagcgcttcttttctacagcagacagataactaaggtttcatttcctcttctatcaaatatgcccatttcaacccatttgtctcctgcctggttcaggaatttttaaagaggcaccagagagaattgtgtgccataatattctaccctggatgggaatatgatcctcttgacactgccttgttgacacagaacaaattaactctatgattgccaaatcttttccactttcctgttgtgtggacagggcgtagctcaagaggcagcattgaggtaaatcctcatgggaccatcctaatgacagggtactcccttccttatctgacctgtgattggatgcctagagtgtgcctggtagtgggcgggggcaattgctttaagaaatctggtggtttcaagctctaaacacattcaacacaccatttaactatgcattcagataatttggggaaactatgaatgtctgaatctctcaaatatattcctgttgtgtcttccatttcatcttttctcaacctattgttttgctgaaagccaaagtttcccaggggagcagggaatgataatttatgatgtggtttagctctgtgtccccacccaaatctcaccttgaactgtaatccccatgtgtcgaggaaagggcctggtgggaggtgattgaatcatgggggtggtttcccccatgctgttctcatgatagtgagttctcatgagttctgatggttttataagtggcagtttcccctgtgcttgctctcgttctctctctcacctgctgccatgtaagatgtgcctgcttccccatccaccatgattgtaagtttcctgaggcctccccagccatgcagaactgtgagtcaattaaacctcctttataaattacccagtctcaggtagtatctttataacagtgtgaaaatagactaattcaatgtattaagggatcacatcctttcagttaagaaagctcagagtaacatatataatacattcactcatgcatttatttattcctcaaatgtgactaataccttaatatgtgccaagcattttgttaggtttggtagtcttatgagtcagattatttagctgagcctaaagagatgacccctgttagtgttacagtcttagaatcacaaagaactgaatctcaaacctctgttaccttgatcaacttactcaactgaattcaaccctttgcaaccaagattcttcattgtaaactaggaagcataatagtacacattccctgggtattataaggctgtaatgagattatagacacaacaacagactctaaccccaaagtaagatgtcaacaggggtagtaggagttgaggtcattttgtaaaattaacattaatatgattaacctgctattccattcagagctggcttcatggatatatgacccatgcagtcactcagggctctgctcttagaaaggccctatgcttgatttaatgctctgatgtcgctaacctgagcttcttattaattgaactgttggctctacattttgattttgcatgggataccaccaattaggtagctagtttgggttccagtgtaagaggtgtctaatatgttaaatatgttttatatagagcctggagagtggtttaggagctgacccagaagcggaaaagtgggaggaggagttggatgaggaagaattgacaatagtgcatatgcatgcaaaacacatcatttattcttcaccactacttaatagggaagtaatgcttttatatccattttattgataagaaacatgagtgacagaaaatttaaacttttccaaatcactgggctggtgagcactatcttagactactctctagattagagagttcagggaaacactgtgtgctcatgggtttcagcaggtctatgtgtaaccagtcttctcaataaggtcctcttgtttgaacccagtggaatggggtcctcttgtataaaaccttttctgtaggctggagagtccattaagcaaatggtaagctttccacgtctggggctctagatactttctacaaataaaaactgtgctcacacggaatggcaaagaatggtctcagttttgtttctgcaaggctttgaacagtgcataataatgtgactgcttcaagcgcttggagctcgggtctccctgtgatattttcatgtcctcaataacttgcacaaggacagattggttgctggcactgaacactagtgatgcatttttgtggacgctgctcttgtaggcctatttggtatcttgactgttgtcaagctctgacttatgggaaaatgattgttctgacctctcagagcaaagagagttggcccttgagagtttgggtcctggctgcagaggtgggctgttatgggcatacaccatatcttgcatcctcttctgctgttcttagatagagtcttctaggtcactagatattaacctttttgattcctaatttctttttttttttttttttttgagacggagtctcactctgtcgcccaggctggagtgcagtggcgggatctcggctcactgcaagctccgcctcccgggttcacgccattctcctgcctcagcctcccaagtagctgggactacaggcgcccgccactacgcccggctaattttttgtatttttagtagagacggggtttcaccgttttagccgggatggtctcgatctcctgacctcgtgatccgcccgcctcggcctcccaaagtgctgggattacaggtgtgagccaccgcgcccggcctgattcctaatttcacctggttaagtcccaaccattccttgtgttttgtctcaaaagttaattccttgaatctcaagattgagtgggagtcccttgccatggccccctttgtctagtgaacccaatttttttttgtctcttcactttccattgtcctcattagacttgaaccttcatgaaggcatttcccacttctccacaactgaggaattgttggcaaatatttctcgaacacactctttggaaaaattcagctgtgcacattaaatcgtaagatgatctacaagatcacagacccctctgaggctaatcatgtacatgtctatggatctcagcacagaaaacctcccttcagtgcctggtatatcaaatattctaatcttcactataaaactctgccaagggtaatgcagacaccgtttggatgcctccagtgatggtgagcttactatctctttgaatatcccactgagaccactgaaatcattggaagctggctggctgtctggctggatgaatgaatggataggtggggggatggatagatggattcactgactggataggttttattgggacccttctctatatcaggcctttttctagtaaaacaacgatgggcaaaatcaaggccctgctctacaagagctatattctaagggataaaaagacaacattcaaacgaatatttaacatagtgcaaagtgtgattcctgctatggaggaagtaaagcagggtaggcagtgtggcagagatgggaggcaaagactattttaaataaactggccaagaaagaccttcctgagatctgtaaaaaaattaaaaaaaaaaaaaaaacacaagaagtgggctgggagaagttttgaggggctgggcttttcaagtagaaggaacagtaagagcaaaggtcctagggcaggaaggccagggtggctgtagaggaaggggcagaagtggaaagagtcaggtgccagctgctgtgaggaccacagggattttcttttcctgtgtttgatgagaagccaccggaaggcttgaggaggagagagtggtggcctgattttaaaaggatccctcttttgtggagaggaacccctaggggagagggtggcagcctggagatcagggaggaggcaagtctggtcttccaggtgagatgtggtggttgcttggacatgattttcttctgctcagcccggcatcacagttctgtccctctcaaatggaaagccacaccctttcccaagggagatggccatgtccctgatcctggcacttggctctgttgacatgacagaggaataagggctagggtgggagtgggtttccacatacctctgtcctggttaaattgtacagtagggatggctctcagtctgcaagcttggacagaccagaaagagacatttttaactttccttccaattaaatgaaattcctgtctaggcccccatccagctggatggctagataaatggatatcagctaccatcagggctcccacatcagctgggttgtgcaaaggtcctagggtcctttgctaaagcactaagaaggggctgttgggtaccactgagataacttctgcttcatttgattgtcctctgtggtccagcaccttagccaactcttttcaacttttagggcacagaaaatttcagcaatactggaagtccctgtttgagacagaagacatggaggtgacacccattataaaagggggtatcgttttaagtcaaagggatttaatctctaattagtactaatacattacttcgataatttgattaattgatctaaaaaattaatccctaagtctgaaaaaataatctaagtggaattgtgtttcctttcattcaattaacattctgcttctatcctttttggaaagagagcatataaataaataaatacgttcatcttcattaaacattgagctcatggttctccagtgcatagtgagctgatgaagacattgatgtatactgcagctgcacacaccttcatagagaaggcaagcagaagcacagctctgctgcagtgtcagtaagcacagacaggtgggcagcaactgaaatttgagtaaggatgtttctctcactgctgcagtcatagcaaactggtattgtcagaatgacctcaggtgtgggatactaagttctctctgtgaattatgcaggaatgagttgtctcctttccttgtcttctctagtgtgaaataataaaaaaaaaagattcctagattcatttattgagaaatatttattgaagtctgcaaagtaccaggaatttcctattcttgtggatatcttcactccagtgagacagatgataaacaaataatcaaatagaaataactgatggttttaaaatgaaacacggaatgatttttaaaataagaaaagaaatatctgacagtaataagtttcatgaaaaagttatagtcaaatggtagaacatggaggaggagtgtttttatgtgttggggaaagagggtgtcatataaaatcttttttctttgagacagggtctggctttgtcacccaggctggagtgcagtggcatgatcgtagatcactgcagccttgacctcctgggttcaagtaatccttctgcctggacctcccaaagtgttggggttacaggcatgagccaccgcacctagctcatgtgcaatcttgaagaacattccaagcaggagcgatggaaaagtgcgatgtagctgcatccttggagttttaacaatagctaattcttactgagaattaatttatataatacataaatgaatagacaagataaaaatggttgtggctcacacctgcattcccaacactttgggaagctgagatgggaggatcacttaagccaggagtttgaaatcagcctgggcaacaaagcgagaccccatctgtacaatcaatcctcaataataatcaataacaatcaatgaataaataagaaaaagagtttccagtgtctgttgcataggcaaagcgaggaaggagcagaggcctgggctgggcagggaaagcattttgaacaaaactcttgtgggaggtatagagcttcttactgcaaaccagggcttgggaattcaaatgctcacagaggcgttaacacaaagaaataaagtgcattgtatgtgtgtgtattatatggatatgattcccaagaaataggctttctgccatcatttttttgaatatatgctctgtttgggctattactatttcctacttcctttttcttttcttttctttttttttgagacagagtcgcccaggctggagtgcagtggtgccatcttggctcactgcaagctccgcctcctgggttcacgccattctcctgcctcagcctcccgagtagctgggactacaggggcccgccaccacgcccagctaattttttttttttttttgtatttttagtagagacggggtttcaccatgttagctaggatggtcttgatctcctgacctcgtgaaccgcccgcctcagcctcccaaagtgctgggattacaggcgtgagccaccgcgcccggccactatttcctactttcagtagagacatagatataaaacatatttctcaaatgtaagaaaaagctcagagcaacaactgaaattcagactcagcattaatgagacaacagaatatgctggggactgtggaaaaatgggaacaagtctgctccctgtggagtcagctttggcaggtattaagagtttttagaaattatagaaatcctgaggtggggttgccggcacatgcctataatccgagctacttgggaggctgaagcaggaggatcacttgagcccaggagttcaagatcagcctgagcaacataacaagaccgtctctaaaaattaaaaacaaagaaaagaaattgtgataatccacatttttatgtgaaatctgattttgaaacaatggatattgttttgtttttacagtgtgcacgtcaaaaccacacctatctccaggccggattgtcgctgtggcttctggcttgagaccttggcatagacatttaagagctccaggagctcataccttagttaaggagaaaattccaatagctcaggagcaatgagcagattgttttttaatctccctttgcctatgcaacagatactgggaaatctttttcctattaattattattgatcattatcgattgattgattattgattgtccatcttttggcatgcacggagtattagaacgtcacaggagggagaaagcaaacagatgtgggggttttgatgaactcaagaaggtgggtagtgtacgagccattaaataataggtaaaataggagtaagtagcagctagaacaggtgtttctggaagaccatatctaggaaagacaagcgttgtagtagaacaaagagtttgtaggagattgatctcctgggaaccagatatatataagggactctaaaaggtcagcgagtaatttgaaacctgacctccttctattgtctggagttcgttctcgctgccggcagctaacctctgtggtcaggtttgggtttaattttgtcttttgcgttgtttcagaaattgctggtgaagacatttcccgccaggtggcgatgttctcatttggaaaaaaaaaaggcgcaaaaaaatgagcaactttctttgtttaatgatgctggctggattgtctgatccccgcctaagcctaggtttattaaagctaataaaataaaaacagcttacacacttttcctttcctatttatcttatggcacttacttcagtttgtgccacgccaagcccgtaatgtttatgtctgctgcggttgctaggcaaactgtatacaaggagaacatctgtattattctaaggattgtctctggaagcatcgctgaaaagaagcatgagttaataggtggtcagagaactatgctgagagtgaggagaaaaaaaatgagcttcctcttccatattccagcttctcaaggcatatggatttcaacagaagacctgctgcagaaaacctgtttataacaaatagaatatggaactattttaaacagataagttttcagaagctcagcccaagagcacccagccagaggtgaatgggcattggatttgtcagaggccagtcagcaggggacaaaagccagagctgtgaccagctgtggccgcagaaggagggacagtcagcaggcagagtttaaaattgtcatttatttctttgaccccatgtagatttttttccactccaaaaacacagcattgaatccagacagttccttaggagggcattgccagccctcacagcaagtaacagttctaacggtccaaatttctttgcagaaattattttctttttgttttctccttccttttttttttttttcttcttgcttacacaggcactggtctggccccttctggaaggaagctggataagcctgtcccctgtttcccctgcagcttttctcttgagaaagagaaataggactgttctgggcaccatatgtttttttctcaccgtcatccttctcagcatgaaggaagaggttgggcaggagctgtgcaaagaaggagaataagttcagggggcaggggaaaggcacttgaaaaggcaagagatgggtgcggctcttctggaaaacaggcagatctttcttctgcctcttcagctcagcttgtccctggctggctctgactttgtgccctcttctttgacgtgggaaggatgatgggcgccagctcctgtgccgggggtgaggaactgcctgagaagtgcttggtctgaggccagcaagtgcaaagtgtgcagcaggactcgctccatcccctttgatgtcaggaatgagtgttaaagtgatctgcttcgtgtataccgctcacatgtgctgacctgtgcttcatttctctcctgcacaaggcactggggggctgagatcctcctcctagccccaattctattttcttcctcctacttttcactgctttacccaattctggttcttatttgtgtatattcagaacctgcttctcttcccccagtgggaataaatactgtgttcttcgtttgtggagcatttcttgcccttcgccattggctcctcacagaccagtgtctctccatctctctccctctctcctccactgctttgctattgaatggaaaggtgatgctagggaccagctatttccaagcctgctggagctcccactggaaaaaaaaaatccaggcaagcctgcttcttgtctgcatatctgcaccaaaacccccttctttgagcagacctggaccctgctggggtggggaggggtagaagaatggggagagcgagcgaaagatacagaccaggagacctgcctctagcatctggctggagagaggtggcaccgttctttgtcccagggggttctgctgggcagtcacagggcgggcccaggtggcatgggcatcctccactctgtcgcattctgcccataagcttcaactattgcctcctgactgtaattttgatgtgcaccttgcccataagactccttgtctgcaatcagctggtcaagtttattgctcaacttgtgcctctgtgtttgttattagtgggtctagcttctggaggtttcagctgaccttcctagcaagaaatgccaagactgaaaaccagggatgcattccccagtacaaaggagtgtgcagccagctagcggggaggccccactgacccctgctcactgggtaccacatacctgcaggtctgaggatctcactggcctgcttggtaataatctggcatctagaacttcccaaacaggctgtactgaaagggctgtttgccaaagcggctggctctctgagctgtctgttctggactgcgatgttacccatgattttactttcagggcatgagcttgggttcagctacaaggctcaggtgtggtctttccctcttggcaggggggatgggtgaattgccattttcaaatccctgcctgtgccgagctttgtggttggcagtagtctagtccagttgcaccaggctgagcctcattcattcaacaaaccttgagagcctccctgacactcttctgggcactgtggatttaagataagcaagataatgttcctgctgccatgggcaatttattagaatgggagtgggtacaggtaataaatggtacctaaataatgtgtcaggtagcaataaggctaggggaaaaatgaagtgagggaaaggggtgatcagggaaacctgagcagagagctgagggagtgagccaagtagttcttaagagctggaacattccaggcagggggagcaaaaagtgcaaaggtcccgaggtaggtttaggaggaatgcgttagagcaacagcaaagaatccagtgcagctgtgatgaaggtagcaaggagaaactgctagaaaaggatgctggtgaaatgaaggtaggaacaaggaagctatatagggctttgcaaaccctggtagggcttttgtgtcttgtttggagtgcaatatgaggtttctggagggttttgagaagaggtatgatctagtactttggcattttcaaaggctcatttatttttctcattttttctaatggagaacatggtgtgtgagtgtgtgtgtgtgtgcatgcaagcacacgcatgtgaagttatgtgtatatatctaggtatgcatatatattcatatatacatacagttaggtgtatgttatacatatcatttgaaaataattggagtcagtgtctataagcccccttttcattaaagctttgctacacacagatccctattcctcaatttatttatctatgaaagtagtaaactcattgtggaagaaaaaatgggagcccagaaaccctttgaggctctgacacaccccataggctcccttgtatgtcttagcagtgtggtaacttacactctccctttcctaggcaggaggtaatagcagagatgcttgagatggtagggggaaggctggagagggaacagatcacctgagcaaggcaaaatgacttttcagatgtcctgataaatgtattgctccataagaacacatgggaagggctggtgttcatcattacacaccatgctcgtttctccacaaatgtaaaatgactcaggagagagccttctggtgttaatgaaggactacgtgtatttttagaagcatggagaattaaagaggagattcacaataagatcgcaggatgttttagatagaaagtgtgtgtgtgtgtgtgtgtgtgtgcatgcgtgcatgtgtggacatgtttttaagatggagatttctgcaaaaatagctcttattgaaaacagattttcagattctattttaactaatcttttttttttaagtttctgtggagcatagtttgtccacatcagggaaatgctcaggtatttttggccaaaaattttaaaagttggctgcaaatctatttgttctaccgtaagtatcctcttaatcgaccatctattaaaagttgaccgtaacttactggtgaaactggactcatctgaaagtatttttatagatgcagggaggagttttatgagcttttctttgaaatcttttagttaggggataaacccaaggcttctccaatcaagttcacctggattcaaatgttttataaatcaaagttgcataacaggacacttctgatttcctcttaatgtgatttgaatcagcaatgtatggaacatcaatcaaacagtctctgtcaggaacctatgcaaaatcccatcattttagctaaatacggaggaaagaaacaaccaaaagttcaatcaaaagttggcttccacaacagcttcctcatgagtcactacagtgactcttgcccagctgtcggctctaatcccctctccttgctacagccactggtggtggtcctaaaaggcctaaatgacgaagttctaagtccttaaagggtacctggtggttgtcaggccacacccttcttcaggctcacctgagctgcctcctctgtggagtctgtttcagccacaaggatgtcccactcctctctccattcctcccccacttcacactgcctggctctggctcatccctgagcccccacatgctgagtcttctacccttagtgattccccaactcccccacctctgcaatgaatttaattcaagcagctctttccagagacacgttttctgaccagatggcaggacattgaagcccgttctatgctttctctgcatggtggacctcgccttcatgaaacttatcacaactggaatcaactgaatagttgagtaattagttgttgaaggtctgtttcctccaaacagctttattgaggtataatttatatgctatataaatatgtactacgtatatactgtgtaaatatatactatgtaaatatatactatacccacttttagtaaatgtatagagttttgcaatcatcaccataatctctgtttagaatgctttgcttcactcccaaaaaatacctcttgtccatttatagtctatccttcttcccacccccaactccaggcaaccactagtctattttccattgctctggatttgcctattctgggcatttcacagagaattttatgatacatggtcttttgcatctggcttctttcgtttgctgcttttgcagtgactgcatgttgtagtgtggatcaataatgtttccttcactagaatttaacctcattgaaggcaggaacctggcacattgtccaattcatgaatacttatggtgtaattcacccactatgtgccacatgctgagggcgtatttattcataagtattacctatccttatcgtgagttatatattctttggggaaaacaggaaaaaaaaagtaaacagacacacttcaaaataattggaagttgtggtaggttagttatagtaacaggtaaggagatgggtttagaagagttgttatgggtttgctttagcttgtggggggtggtttgtgcctataagagattacaaaaatgtttaaataaatgttgaataaatagatgatgacataaagtgtctcaaaaagtaccagaaggtgtataaaaccatgcttgttttcacacataagtgttactatccttagtgacttttggtgctgaggccctagtgagcagaaatcccatgtaaggcctggctccatgagtctgagccagagagcacgtgactgtgcaactcaaggttgaatagcggagagagtcagtgatatggtttggatgtttgtcccctccaaaactcatgttgaaacttaatccccagtgtaacaggattaagaagtgtagcctttaagaggttattggctcatgagggcactgcccttatgaatgggttaatccattcatagattaatgggttatcatgggagtgggttggttatcacgagagtggacctgttataaaagccagtttggctgtctctcacgggtacctcaccatgtgatgacctgtgccacctcgggactttgtagagagtccccaccagcaagaaggctctcaccagatatgtttccttgactggactttccagcctccagaactgtgagaaataaacttctttttaaacaagttacccagtcctagctattcagttatatcaacagaaaatggactaagacagtctggaaattaaataatcatagtacagactgttaagtctgcaaaatggtacgggcctatgatggaaattctcaactcagcactgacgataatttgtggctttggcaaaaccacttaacctaataataatagtagataaaatatattgaattgtttctatatatttttactaagtatttaacatacattactcagttgatttttaaactaactcattatgtggtggttatatgttattaaacaataatcatgacaataataataatgattataaaatttttattactataataattataatcattagtattacatgccatacactgatctaagcactctactagtattctccacttaattttcacggcaaacctaggaggtaagtattactacgtccactaggctccacgaagggcaagaactccttcgtttattcttcagtataacttctatgccagcacagtgcttaatgaatatctgttgatttggtttgaatcaaggactatcagttttatagatgaggaaactgagctaccttacagtacctaataaactcacccaaggtcaggccagcagtaggtggtcaactcagatgtaaacctggtgagtctaaattcagaagtcatgcacttaaactttgtaattgttccacttatgattattttttagagacgaggtcttactatattgcccaggctggagtacagtggcacaatcatagctcactgaagcctccaactcctgggctgaagtgatcctcctgtgtcagcctccttagtagctaggactgcaggcatgtgccaccacacctggctaattcttaaattattattattttttgagacagagtttcactcttgttgtccaagctggagtgcaatggcatgatctcgactcactgtaacctccgcctcctgggttcaagcgattctcctgcctcagcctcctgagtagctgggattacaggtgcgcaccaccacacctggctaattttttgtatttttagtagaaacagggtttcatcatgttagccaggctggtcttgaactcctggcctcaggtgatctgcctgccttggcctcccaaattgctgggactgtaagtgtgagccacccacctagactgctcagcttactgagttcttgaattcctcttctgcagaatgtgacttttgcctgtaatgatcttgaggtcccctggctctaaatctctacatcaaaactacattacagccctgtgtacatgaattatatgcctacattttggaggtgaaccagggagatataaatttaggaatctaggccaaggaaaggtattggtgaggaaacctccctaaaagcctgagtccttcccagcaagtagaaaaatagttacaaaaagacaactaccccatctacatggcccataagctggatcagcatgtaaggtggtcacccagcttcctacatacccagcaccatgtgggagcaagacaagatacagcatcatgtaccataacagaatctaagcatgagtatggcattccatcacttctgccatattctgttgatgagaagcaagtaacttgatctgactgatctcacaaaggatgaaattatataaggtcatgactcattgggggccacctcagggtgtgtcctaccaccaggttactaggttaaatgataagtacatgtaaatatgactagatgtggctatatattacatagcacaaagcctgtagataccccgttcctaacagcagttgatgagactatcagctccctaatttccttggtattatttttctaatttatctatcttgctaatttagaaagatttaaggtttaatgatttgtttacacttatttaatacagaatcatgtgtttgcttacaagtcacaagtagattacagcacagacaagtgcttgagagcgatcaggagacagacttggtttggtttgcgctctacaacttatcggctgtgtgaccttgggaaatttctcaatttctctgaacctcagtttccttctctgtacaaagatttaaaaataatgctgatcttgttgagcatttaatggcataatacatatagattacttagcctggcgcctggcaaatagctcttaatgtactgaatgtttgctgtgattttcagtttatccttagtggcaatagtatcttcagcatcatcacaagcttgtatattatgcttcttttcttttgagacagggttttgctgtgttgcccaggctggagcccaggggcatgatcatggcttactgcagcctcaacctcccaggctcaagcaatcctcccacctcagcctcctgaatagctgagaccagaggtgtatgccaccacatctggctaatttttaaatatttttttcagatggagtctcattatattgccgaggctggtgtccaactcctgggctcaagtgatcctcccacctcagcttcccaaagtgctgggatatgagccaccatgccaggcttgtagtaccttcttgttttgttgttgtagttgttgtttttgagacagggtctcactccattgcccaggctggagtgcagtggcttgatctgggctcactgcaacctctgcctcctaggttcaagcaattctcttgcctcagccttctgagtagataggattacaggcatgagtcaccacatgcgggtttttttttttttttgtatttttagtagagatggggcttcaccatgttggccaggctggtctcgaactcctcacctcaaatgatccacctgccttggcctcccaagatgttgggattataggcatgagccattgcgcctggccccaggcttgtagtatcttcttgatcagccttatggatcatggctctcaggtctcagagatctaatgatagtgtctgtgtactgatatatactctttatgcatttatatctcccttaagtacaaattgtactaaagaagacttaagtggtatatattacatgttaagccactttattgagatatgattaacatataaaaaattgtgcatgtctaatttatatatctccatgacttagaggcgagtatacacccatgaaaccatcactatcatcaaggtcaagaatatacccatcatctcccaaagtttcttcctgtccccttgatcactattattattattttttatttttaacttcccacacaacaccaacatagattatgatcatggctgtttttttcttttttcttagtaagaatatttaacataagatttacttccttagtaaatcttaagtatgcaacatggtattgttagatacagccactatgctgtatagtagatctccagaacttacttacctcaagtggtatttttaagcctggttttgaaatacgtttttatttggtgattgttttgttttattgttttctgagtgtcagagttacttgcaagtcagtgatactgaaaagcctttctctccctcataaagtcttgaatttctcattacgcattaaacattgtttgcctacttttaatttttgttttttactcaactttccccatctatcataatcccttccagtatcaggagaaatcattcaataggtttgtggagatatcttgcttataaaccacgtggagtaaatgccttagattgaatctgaggacaggtctgacatagttggggttgacagttttacttttccgacaatttttgatttactgttttgggttttatatgggcaggggatgaagatggccacacatatatatatatatctatatatctatatagatatatagatatccatctagaaagagactaagacgaccacaagttgaatactgagcttgaatctctgaccttgtggaatcttgcttttttttttttttccttttgagatggaacagagtttcattcttgtcgccctggctggagtgcaatggtgcgaactcaggtctctgcaacctctacctgccaggttcaagcaattctcctacctcagcctcctgagtagctgggattacagatgcccaccaccactcctggctaatttttgtatttttagtagagatggggtttcaccatgttggccaggctgatctcgaactcctggcctcaagtgaaatgtccatcttggcctcccaagatggctggaattataggcatgagccactgcacccggccaaaatcttgcttcttgactgttgtaaaactctttactaaaaatataactttattaaaagtataactgtggggaagtggcagatcatgtttcagggaagaaagtttttgtctggtttgtgattgaaaatactggctgaagattcaggcctgattcagatggactcaaatttcgatcgtagatctgttgtgagctatttttggcaagttactgtgtatactgaagccacaggatcacaattcattagagtcaactaatacccagggaataaagtaagccagtgacttcaagaactttatgtgccactgtcagagagagacaataaagaaataataagtacacaggtaacatgatgcctgctagtgactggtgggaaggactaacatgatgggggttgagaatgctgctttagggaggatgctggaggagtcctcttcaaggtgacatgtaggcaaaaatcagaggtaaaacctgctttgtaggattgttatgaagattcattgagtctacaaagcctttgaaatagaacctgacatctatacttggaataatctcttcttcacgtgtgtgtgtgtgtgtgtgtgtgtgtgtatttgtgtgggtgtgtgtccttttataattaatgacatatatccattccttatagtcttacaataaacacttgagttttggagctagaagaagcagatccacggacagtgagatatgaatgttcaagcccaaatgttgaggccagggaggagaagctagaatgccgcaactgggtagaattattctaggagaagtcacagcaatgtcccatcttctgtgagaccagaggaaaagcacatgcactgatgtgtgtccatgtgtgcatacttgcgactgcaaatatatgcatgcacatatgtgttcatgttttggcaaagaaggtcctataggttgttctcagggtcaaccccctcaacccctccctggcagggagggttttcccctgctctactttatcctatatttttggaggtgttcttaaatggccgtatgcaatgtaaatttcatttagatttggtttggggcagagtaggtctgttacttctgccatttgcttctcaaatggattatttcatttacttgtttacacagtgacacaaaatcaatccaaagtcttttttttttcagcagtacacgtgactgtccaatcccagcaaaagagtgcttaaattgtgtgatccagtgcttaaagtgggacagagcatttaattacagtttaattatctttgcagaagtggagctcagcggtgctttggttggttggtgggcagctgtagcttctgggtttcctgctgccttttttgagagtgaacttgtttgtaacacaatcagatttgcaggttgtagcttcccaggccctatcaactgagaatttcattgcttttaaattgcaagccttttgttatcactacaactgtgagccagacagtcagaatcaaagcaaaaagaaatgccaccatatgaagaggactgagtcatagctttggtctggtccaagttacagagaatgcaactttcagattatttgcaatcccgattccttgtccatgatatcatgtgttgcttttgcttcttatttgcaatttccagtacatatcaatatccttgagtgaagtttaattgtggcctccttgcatttttgcagcagaggtacctgaaatttttaatatatattcttgcctcacacaaagaaagggagtaaaaactgttttcatgaaaagaaggtacaagaatataagcattgtgttgatgactctgtaatctgtctgcatctggttaataggataacaaaaacagttatcagagagacgagccaaagaataaaatgtaattttgcagagcctgggcgacatttctattcgtgatttccgtttgctatgcattaaagcacaatggagccatcaggagggaatgaactttgtgataggaaagttttagccgctgtttgtcagctgtcaccggatgcaagggtaccgcagctggagctgagcttgtcacttcaacttctgctagaaaggtaccataaattggatgcagggacaaaaagcaatgtaatcaaaatgaatccccaagattgaggagagacttttaggaccggagggcccaggaagatgtttcagcaggctgcaacaggaatgctgctggcaaggtggtttctttctctagcttcaccttccatgcttggtgattgtgttcctaaataagctgccaggtgtccacttgctgagttatgttgaggcactttgcacaaatattgaatgttcaggtggcagttgttaggcggcattagtgtgcccttatatgtaataaaatgttgatttcctgttacttgtttgcacaaacctatctctgactttattcttattgatacctatctaggactgctccaaaaagaaataaaagggtagaatccatcaaagcagttccggtaaatgaaacaaaattcagaaatctctgttctctcccctctcattccttgcagcttcattagaaactgagttgtagaaaagaaagaaaggccgattgaggaggtaggagacctctttttaactgagcactgcttgtgactgcaaaggagagaattaactttgtcccaggtctaccttgaaacatttcaccttcaccattgtcctgtgacataagaatgtctccactattttaatagaagaaaaaaactaagtatgagacagctctggcacttgcatagctaatacacagtgcaccagagaagatttggttatgaccaggcatactaatttcctattgctgctgtaaaaaaaaaaaaaaaaatcataccaaacttaatgacaaagcaacacagatttgtgatcttaagttctggaagtcagaactcctaaaaccagtgtgtcagcaggactgtgttccttctggaggctttagatcagtttccttgcctttttagatcctagaggcctcctgcactgatatgacctgaggccacttccatattcagagccatgacctttcaaatctctctgtctctgacctctgctctagttgttcatctttgcctctgattctccattgaacccatatggataatgcagaataaccttgtattagtctgttttcacactgctgttaaagacatacctgagactgggcaatttacaaaagaaaaaggtttaattggactcacagttccacatggctggggaggcctcacaatcatggcggaaggcaaggaggagcaagtcacatcttatatggatggcagcaggcaaagagaggcttgtgccgagaaattcccatttttaaaaccatcagaacttgtgagacccgttcactctcaggagaacagtacaggaaagacccgcccccatgattcaatcatctcccaagaggtccctcccataacacctgggaattatgggacctacaagatgagatttgggtgggaacacagagccaaaccacatcactcctcatctcaagatcattgacttcatcccattggcaaagtcccttttgctatgcaaggctgcatattcataggttctgaaggttggatatccgtggggagccatttttcagtctaccataccaggctgtagaaaatagtgttatgagaagaccaactctattcttccaggtatcttcaggcagaagagcccttgatccacaaacttctgtggcaatttctagaactgagcaggattattttaaaactaagaataagtttcagtcataagatttgtttttctttatcgcataatctataaatttcacatatccagtttcaaagactttcagtgaagccaatttttaaaaagttgacttaaattagaaacaggtgtctgaggacattaaatacaaatgcctggttccttagaacttttggtatatgtagatgcagacttcatttctaggcactaacacagggtcactttgtatgttcaaaaaatgcagaaataaatctggtgcctttttttttttcagtttcccagctataactggctcaagaggccatagctgacctcattatttctgcagcctcttgttactacaatgtttacatcttcaagaggccccatgctgaatctagagagtgtcttcctgaaaagaacagagttgtttaagtgcatgagtcctagagctatagtgttggggtttccatctgggactcaaacttttctagctaagtcagttgggcaaatgtgttaactgtacctgtgctacattttattacctttaaacaatcatgataatgatgactctacagtattactgcagtaaggtttacaggctgaataagatgcttctgctacatcaaggatgctcaataatgctaactcttattagtatcactgacaaaccatgtcagtatttagtggagacttcacacggaagagatacatttttcaatgcctattttttctttctttttttttctttttagatgcagtctagaaagtaaaaaagaaaaaaggaagcatttttattttctgacttctttaaactaccttttacagtcattagttttagattttgtttttttaccttatttttctctaaaagctgtctctccttgatttgagtggattttttgagtctgcaaagcccagctacctccctcctgaagtgagtgattactgaacctctgaccccttagccttcctcaccctaccacatgtcctttgtattactcttcataccaggaattggaccctgtacacactgaaaacaatatttctaggagagaagcagaagcactgtatttccttctactttatgtgcatttcaaagtttgtcatcaattcctcgggcagtaaactttttttcacattgttaagaatttgtggctaatatgcctcttctgaactgaaatgtgtccccccaaaatacattgattgaagccctgactcccagtgtgactatatttggaaacaggacctttaagggtcagttaagggtaaatgaggtcaaagagtagggccttaatccaacagaagtgattggttggtatccttagaagaagaggaagaggcaccaggagtgtgtaggcagagaaaagaacacctgtgcagacacagtgagaaggcagctgtctgcaagcgaaggagagagccctcgccaagaacaaaccctgttggtgccttgttcttggacttccagcctccaaaactatgggaaaataaatttttgttgtctaagcctcccagtctgtagtacttttgttgtgcagctccgtctgattaatgtactgcctaatgaagacttattttaaaaataagaaagcatccaggcacggtggctcctgcctgttgtaatcccagcactttgggaggctgaggcgagtggatcacctgaggtcgggagtttgagaccagcctggccaacatggtgaaaccccgtctctactaaaaatacaaaaacttagccaggtgtggtggtgtgtgcctataatcccagctcctcaggaggctgaggggggagaattgcttgaacctgggaagaggaggctgcagtgagccgagaatgtgccaccctgggcaacagagaaagactccatctcaaaaaaaaagaaagcttagctggtgatatggtttggctgtgtctctacccaaatctaatgttgaattgtagctcccataattctgacatgttgtgggagggacctggtgggagataactgaatcatggtggcagtttcccccatactgttctcatggtagtgaataagtctcatgagatccactgtttttctaacaggtatccccttttgcttggttctcatttctttcttgtctgctgccatgtaagacgtgttttttgccttccagcatgattgtgaggcctcctcagccacatagaactgtgagtccattaaacctctttttctatataggttacccaatctcatgtatatctttatcagcagcatgaaaatgggctaatacagcatgtgtcagttactttgcttaatcacattctatgcattcactcatttaatcttctcagcacctctgaagagggttctagtattgctgtcactttagagacaggatagccgaggcttctagaggtaaaaccacacatagctagcgcaatgcagagttgggaagcaaacgttggtctctgtgaattcagaggtcatgtactcaactgccgcatgtgttatctcctgtgtgaggggtgggaactgtgagctgaaatacttattggggcttggcagctaagttaaatgaataaagcaaggtggtggcaaagaggacctccctcttaaatagaggaagcattacatgcatccagctgattattgcctcttagaaatgtggaaagaagtttgtcttctcattttttaagataattggagaatatggatttttctgtgaaattttctaatattgacgacaacctgttaaagtcaaagtgatattccttacctgttaccatgcaggtcaaaccaacatggcttcagaatagacgtggcctgggggcagccagttataatctctggaacacctttctttatggtcaaaaatccagcatagttagccaggtgttgactgaattcataatatacaatttttttttttgagatggaattttgttcttgttgcccaggctggagtgcaatggcatgatcttggctcaccgcaacctccacctcccgggttcaagtgattctcctgcctcagcctcccaaatagctgggattacaggcatgcactaccacacccagctaatttttgtatttttagtagagacagggtttctccatgttggccaggctggtctcaaacccctgacctcaggtgatccactggcctcggcatcccaaagtgctggcattacaacaggtgggagccactgtgtctgtccactttccaaataattaatttggtttatatggccaacccatgagtttgtgaaacttcagtgaacctggtttactaagagattaccatggcagggtccttttcagagcctggtttatggcagatatccaaagagtatttaatcaaaaagtgaatgatagagaagactttttattggccaggactataggtagagaggacagaagacacagagataaaaaacatacagagcttccttggaagttctattttgagcaagtctaactgcagcttgattttcttgtcagggatcttattcttctaaaatatagtcttcaatgagttcattgagggtttacctatactaactgattctgttgatgtgtgatcaccctacactgcagcaagctctgtgccaggaactgatgatataggtatgaacaaggcagccttgatgtctgctcccatggtatagcaggtgaagaaagcacacctaccttctgaatcataatgtatcttacctagattcgatttttagcattttgagcaattcaggttttatggttatgtgtggaagagttcccttcttaactgtgatgtctttaggattcctatgtatttcagtctaggttttctgaatgaagggaggtaaggtggttcttgtggatacacctgaaagtcagtgccattttttaatgactaatttacacaaactctattttttctctacaatgtcctctaaagaacaccacgtgatagtggtgatatggatatgtaccccagcccccatttgcaggaaagtaatgaaaacttgagttaaatatcttctttgaagttactcacctggtaaatggttttattaatcaagatactttagtcacaagagggaaaaataactcaaactagattgagaaaataaaaggaatttgttggtttgtaaaattgaaaagctcaggcatagacccagggaccatgttattagatttctgtctttctgtatttcttgattcttctatattagcttgattcagcatgcacatttcatcagaagctccaatatccacctagcctctctgcatatctaaagaaaaagagcacttattttacaacagttccaagaaaagtcttaggatttggtcttggagtggaattctagttcctgaaccaaggtgtgtggtcaaagaggtgcaatatgctaatgtggcagatgatattttccaaaactggacacaacaataatcgggtctgataacattgtaaagccttgtcacagcctactgaaaggtaggtgcttctctttgaatcaggtgcagttttgtcattttctcaatgaagaaaatgtggtggaagtgaggctgcacaacttctgagctaagtcacaaaatgccagactcctttcatctgggcctctgtctcttaaagcactcactttgggaatctcaccatgttgtaaggaaacccaggccacatggacaggcttcatgtggatgttctgggcagtaaacttagctaaggtctcagccgacagcaaacctcaatgaccagacctgtgagtgagtacgactttgaatgaccacagcccttgccttcacgctgccccagctgatgctgagtggaacagagatgagctattctcactaaagccagccccagttgcacatctgtgtacaaaaacaaaagatgctgttgttgccttaagacactgaatttggggcaaatttattttgcagccgtggtaaatggtatattgatcatgattaagttgcattaccatccacagaactggagttgggaagtgaaaggggagagtgaacctgaaaggaccatctgtagggacaaagcatgaaggaagggtggttgataacagaaaaatcaaagtgacatagctagaagaagggtgatgaggattagcagacacaaacaacagatgccagtggtaaaggaagcttcaaatattgtctttaaaattcatgctctttttacttcctgatgattttctttccttacctgagctgcccacagacaggttggaacagagtgtaaagatgtaaattacaatataacatgaaaggtgattatcctttccgctagagcagataattgaagattggttgcattagatagcatgcattctgttttcgcatctcagcctgtgatggtacagcctagcaggactgggatggcccttgagatacattgagatatatattcctcgcccttgtgtctatatggggactggttgctccaagttatattttgtgttttcattgcttattcgtatacgttttaacatcaaaaacacaatctggggccagaaggcaaatggtaaatgttaattaaattattttgaacttttttctaaatcgttttacattttcatgttatatttcttccctggtattggtttccaggcatcattggtagaataagcacatgttgcctatgtgaattttgctggcgcttggggaagaagtggctaccacagcatggtgataatacattagtaatttgttgtgagcccccaaatggcaatatgcttcagaaatgccttttgatagctgcacaaggacagaataattcattaatataatcaatcatttaatatcccattttctgatgggaagacacattaacacattttagggagattaaaattctccccaagatctaactggttctcagttgtcctgtcaatgtccaagtaagaaaatgtatctagcaaatattttcacatattagatggaataattgttttcctggttctgcccatttaatgcaaacttgctgatacatcttccccacttccaactaagttatctttgtacaaaccaactgattgtattctatcccctgcttataaaaacaaatcaagtcattggttctgtttcataaagcttttttgagggcccacgcagccttttctgtcttagccccatcctacctattaacttctctgtctgctttatagttttcaaattcctcaggctccatcaaccacaagctgtgtcaggtatgtgttgcttagcccatgatgattcctttttcagaagtgtctattttccattttccacatctaatatttcaattgttttctatatacgctaagacatttcttgctttctttatattccagcatcacagtatatgcctatgtgtatgtgcatatgtgtatatatataaaatgcatttatatatttttatttaaattatttttttgatgctcaaagccacaactaaactgagagctgcctgacaattagattgtgtctagttccactttatatatccaatactcccttcagtgtacagattataataagtaatggatggatggatgactcattgacagagggaatcataatcaagtgaagattacaattaataaatacatataaagtacatatgtcggctaggcgcggtggctcatgcctataatcccagcactttgggaggccaaggtgggcagatcacctgaggtcaggagttcaagaccagcctgaccaacatggtgaaacctgtctttactaaaaataaaaaaattaactgggcacggtgatgggtgcctgtaatcccagctagtcaggaggctgaggcaggagaatcgcttgagcctgggagtcagaggttgcagtaagccaagatctgccattgcactccagcctgggcgacaagagtgagactccatctcaaaaagaaaaaaaaaagaaaatatatatgtcgctagcctttccccatttcccagttcattaatgaaaacactgttcttgccctttcatttttccttttttatgatggaagtgtatatctgtgtcagaccttctctggacattgcccacgaagaatgagaacacattcagagagtagcaagaccagagagatggtgaggtggcaggacataataaagaagattaaacccagccaggagtcccatgggttctgaacctgcacgctgctcacaagagatttctccctgtagattgccctttcccaatgaatgtgtatatctttaggatactcatgaactctccatcttatcacagactctgcaggtcttctactgactcatggtcaattggaaatggggaaccaggctttaaccctctagatgtatctgcctccaagtccatgttcatacactgaaaggctgagtcccactggaccagtcctggattctcctctttttaaaatatatagttttttctggacagtgacaaatcttttttttttcccccgagatggagtcttgctctgtcacccaggctggagtgcagtggcgtgatctcgggttactgcaacctccatctcccgggttcaagcaattctcctgcctcagcttcctgagtagctgggatttcaggcacccgccaccatgcctggctaatttttgtatttttagtagagacgcggtttcaccatgttggccaggctggtctcaaactcctgacctcgtgatctgcccacctcggcctcccaaagtgctgcgattacaggcatgagccaccgcgaccggccgacaaatcttaaatttgaaattaaattgttaaggatatctttatatggtagaaaataacattcacagatgccaaaaagtagaaatctttccagcatcttcccttaatgaattttgaccaaatatttccttgatcataatacttttctttcaaaactctagatggtccttatgtaaaaattttgtgattcatttttttaaaaaaattgtatctaatcttttattttctttcttaagtttatgtttttctagacattttataatgacattttttaatccagagagaagttgaaagaattatgaacacctgtattttcagcaactagttccacaattagcaccttgtcacatttctctaattattcattttctattttcaccttgtcacatatttctctaattattcatctcattgtttattgatctacattattttttatgtaattaaaaacataagatgtagacatcattatactctatactctacctgggaacacttttggttactctccactgccttcaagtagttgtttattatacttggaaagaaagtttagagttgttacatgttagtttgatccaaaaggaacattcctgttagtagtagaaatggaatcctcaagttattttttagtttttgaattttcgtaggccttttctaaattaaaaaaaaaaagccaccagaataggcctaggtattagaatctttttattaaataacttgacagttggaaggagccttttgatgttcggcaatggtcagccatctggttagaagagattgttttagtcttccggtagctgttaatttagctccaacgtctttctctgttccatactgtatttgagcttcttcaacctgtttctcaagtttctgtctttgtttctctttgtctctgtctccctctttctctgtctctttctttctctctcttccttttgccctctcatttcctttaatgcattttttatcctaaaagtaaagtttttgcatatgtctcctaccacgctaattcatctttctacagtagccaatatgcccttcaatgcttctattatacctctgttatgcttctcagtttagcaaatttcttcttctttgtatctattatgtttcttggtttagcaaatttcttaatttacttgcaatgcttcctgatttcaaagtgtttcttttttttttttttttttttttttctggactgtatgccctaagttccatagatgtcatattttgttctttattttattttgtcaatagatccaaaaacatgttctaaaataatgtatttctagtataaatttagttcagaaagtcaactttttttggtcatgtgcttcacttcatgggaagagagagcttttctgtttgctcatcctgagggcccctcctccttcctgtcgttctgttttggtgggtcgctattctggagaagctcatgtctcagaggcatccttcttacttaggatgcctgtttataagagacattctggcaccacatgaaatttctctttgtctagcctcaatgtctagaagtcgtcttgccatggggccatgaagtttgttacagtaagttccagcgggaggcaaccggcatgtcaccatgtatgccttctgactgtagctggtgttaatcctggtctacacattcagctgtacaggaatgttaactgtcagtttttcaggtcagtttaatgtctgactctgaaaccccattctgtcagattggcaggaaaagaaagcaagaatcttggtttcagtctccaccttttagaattcagaccattatctgcggttttggataatgtgaccaccttggagactagataacatctggacttggtcagctgaccctcctgtgaaccaccgaggcatcatttttctctgagcatcaaggtacaccgggaccagtaatttgttgctgtttcattatcacctattgggtaacttgtgtcaaaatgcttggtgcatcacactgccaatatccttcctctagagttttgtttttcttcactggaaggaacacaggacccacttttttttttttttttaagtttctttagacactgtgactcatctaatccttcttttctctccttccttctttattttctttctctctttgtacctttatctcctcccccactagctatctttctttctcttatttttttattttttattttatttttttttgagacacagtctcactctgttgcccacgctgtagtccagtggcatgatcgcagctcactgcaacctctgcctcccgggctcaagcaattctcctgcctcagcctccccactacgtgggattacagacgtgtgccaccacgcccggctaatttttgtatttttaatagagatggggtttcaccatgttggtcaggctggtctcaaactcctgacctcaggtaatccacctgcctcagcctcccaaagtgctgggattacaggtgtgagccactgcgcccagccccttctcttcatcttgtgtccagcaagcatatttacattttgaaactaaacatgcacatgatatgacttcttgctagtgatttgtttccaggatctcctcctagtatatccaaggcaatgtactatttcatgggaggggaatggctttataaagcttttgtatctactctctcacagtaatttctggggagtctggggatttggatgacaactttcttcatttccaaatctgaatcagcattctggtttcttggctatctcatggagatctggaagaataataagtgctgcctttcattaggatacaactgcatctaaaggcctctaatcactttttaggatatatttaaaaaaatctaaacaagggcccccaaataaactacaagctttgtatttttttagaaaaactattatatggaataattaaactgacagagtcaaggggatcttttcaatactaatgaatgaagattgtattattattattattattattattattattattttgagacagagtctcgctctgtcacccaggctggagtgcagtggtgcgatcttggctcactacaagccccacctcccaggttcatgtcattctcctgcctcagcctcccgagtagctgggactacaggcgcctgccaccacgccctgctaattttctttttgtatttttagtagacacagggtttcactgtgttagccaggatggtctcgatctcctgacctcgtgatctgcccaccacgacctcccaaagtgctgggattacaggcgtgagccaccgcacccagccagattggattattaaaaagaaaaacactgatagcaaacagggattccaaatttattctttggcttaaaaaatttcaatattgctgtcatcaggatttctcattttgagctcagttcataatgattctaggtttgatcatattttaaacttgtatcactctaaaatgttaggttaaaacataaaattacagtttatgacagtcaaataatgttgaataacagcaacttcatgtgtttaagtaataggtaaggtttttgctttatgcaccttttagtgagtgtattatacatctatctatggtagacacatttaagaagaggcacgggaggctgaggcatgagaatcacttgaacccgggaggcagaggctgcagtgagctaaaatcacatcactgcactccagcctgggcaacagagtgagactgtctccaaaacaagaaaaaaaaaaaaagaacaagagggaatctttgccattcattttttctgaaatgctattcaaggcagatggtataccactcagatggccagctaggtgacttcttttcccaggaatgtcttgggaacctgcatctattcctcctaacatgtcttccttcctcttcaccagaaaagataacaggcaacctgggagaagtctcttaacaggatgcattttctcatgtttttaaagtgagagctaaaatgttgtattcctaacaaattatgttttgatatttaaaatttccactgaccacatagcaggtccagagcagacatttttccctacatttttcatctcttgaaggtagataactccaaggaactggacgtgtaattcagaaaatttgcaacctttaataaatcatatgggttccttcctagaagaaatgggcttggtttcagttttgaatgagaggtttctgcttctcggactatgagactaacccaggtgtgttcccagactctgcttggtctctcactcttctactcaagcagaggtctgagatgacatttgggctggaggaatagcaccctcatatattagcagtgcctactatagatgaagaattggagagtgaagggctggtgtcaaacaggttcgatctctatacttgcctttacgaaatcagatttaaaaaaaagagtagaaatagtaaattcccttgaaaagatatttgaaagtataatggcactaaaagaagatgctcagttatttaaatttagcatgttcatcatctgggcatgtgggaaaggaaatatctgaagtagatgatgtgtgtgggcaggtagatttgtgatgtatttgccaacatgagcagaggagagaaggagaagaacataaggccaaatacaaaaaaaaaaaaaaaaaagtgacagaactatgggaagagttttagggaggctaaaggtcatgatccattaaaccttgtggaaatattatataaagggaaaaatgctttatagtgataagtcagacaagaagataaattggaaaaaaaagcaacacatctcttaggggcatggtaagaagtttcacaatggcatggacattcagtcatcattttatctcaatcttctttcccaaccaacctgatcatcagtctggaagtgtcaagcaaacatcattaatgggtgaattaaagttgtgtctacaacattaagataactcaagtgttggcaaactttttctgtaaaggcccacaatgtataaatatttttggctttacaagccttatggtctctgttgcaactactcaactctgcggctgtggaagaaaagcagatgtagacaatatagaaatgaattattgtggctttgttccagtaggtcttaatttatggacattaaattttgaattacatgtaattttcacatgtcatgcaatgttctttggcctcttattttttcaaccgtttaaaaatgtttttaaaacatgtatgttttaatccctctaaaaatatgcaacaggaaaaagtaggcttgtgggccacagtctgatgatgctgaaatgaaatatcacttagtcatttttaatgtggtgatgaaattttctattaaatgaaatatactagcatgctgaaaagcttggagatatgactaaggaaccaacaaaccataacagatggtattggctgagtgaaggatcaaatttggagacaaacttgtgtactaatgttgtaaaaggtggtaaattgtcacttctgggaaccatagaccagaatgtgtgagatcaatcactgaaatatattggaacacattattaaacaagcggagacacaaagaattgattactccctagagtgaatgacaaaaataaatatcaaactctaaaaaaattggcagactacattatttaaatagcataagtggcatagatatagggtatattgagtatgcaggaaaatagtaggccaaaattttcaacatacactactgaaaaaaaagaagttgactaaataataacataattatatagggtcataattgttttaacaatgttcaagtatactaattgatgagtttatattccactgagtctgtcaaaccttatcatgatgctaaatattaatttggatgcctaaatgccagctcagcattctaaattgctttctgcctgactgttaacttgaatactaaagccacttcacattttcaaatgactgtttaacaagggcttttgtcttcatcattttgctgaacagaataccaaagactgcataacctattaaaaaaaaagtttatttctcatggttctggaggctgggaagtccaaggtcaagggactgcatctggtgagggcctttctgctacatcatcccatggcagtagggagaagggtaagggagtgtgcaagagcaagggggaaagaggacaaactcatccttgtatctagaaccactctttgataacctgctccagagataatggcattgatccattcatgagagcagagcccccatgacctaatcacctcttaaacgtcccacctcttaaccgtcacaataaaaattaaatttcaaaatcaattttggagtggacattcacaccaaagcagattccaaaagaatcatgttaaaaataccccagattataaaattatgaatccaaaaccaaaaagacaatataaagcaggcataaaaacaaaagtttaggttgaaacaatcacttttatttataagtatagatggcaaagaacttagcataactgcttttgtctttgggttgagtgtaggtgagtgggtagtatgtgttatttttccaaaaaagactaggtggttgtagttaattgtaaactcacagttagccagtgatttgacatgtttataaaggtatgtggtatattttcttttctctttccaacaccttgtgttgcaatttaggacactgtgaagtaaaggaagaattctgttcacttgtgatttgaaaatttttctcatcaagatgataacttggaagcatttttgataatcattttgcccagtgagattatgtctttggacagcttggttgggtcaaattttcacaaactgctaggatattcataatgggccatctgcagttttaagtattcagttgattcatccaactgtatattaaatttaccagaccatcaatgtaagaggcaatagggcttggcaacacataccatactgatgataataagaatattaagaaacataggatcttgtgatggagtttctagtaattcactttctagcattttgccaattgtttaacctctttgaagatgagggcttcagtttgtctctaacagaaatatgtttgtaattggggatgaggtggggctgtcaccttccctatattcatgactatactattcctggatctaatcagcctcagaatctttaacacagaaatagactcagaattagatagatttgacacgggatttgaagaatatttgtcatgtttgagtgagataatctatagagttccctcccagcctaagtttgtagaagattttcaaattttgggggtttgaatattttatcattactattgtgttttctgacttctccccatcatatgtcacttttttaaatcaaatatcatatagtaaatcctaatagtttgtcaatgttttaatattttatcattattttaaaatacttctgattttcctaggataaaccttgggagttttgtaaaaactagtccttcagaatcttctcttacaacagcaattctaaaatctgaaggctagtatttagaaaactactgtaatcaatgttatataaaaatctataatgtagaattccttcgaccaaaagatgttaaggtcaatcaatatatctgtgggatgaggctaattctgttatcttaggatgataaactggaacattaatttcccactctaaattcaaactaaccctctgtctaatattcagtatctctaccattcaatatggcagtcattcattaatttcaacccaatagagtttgggttcctaatgtggagacatggcaaacacaacttaataaagcctactgacaaccttctcaatttccatccattttttttcttagagttccattctctatgtatttccttttcgcctgctcctttatgctcctcttctgttccacacctttttgttacctttgctccacagtccctaagctgcactgtagttactcatggaagtaaagacatatgcagtggctggctgcccggatgtataaagatgttgtgtgtataatatatgagagacatttagcaatattttgaaattatgcagtagctttgatttttggttcttggttctattccaacaagggttttccttctgcatgtatcaaactgctagaggcccttttatctatcctcctggccactctctttctcttgcacacaccagtggcacaggatgcaaaccttgcatctgtatctgtccctgaaattgtgctgcaggcatgcccaatgctgttcttaattttaatctgtttaaggctctgccaaatgaaatgctgttaacaacatttacagttaatgaaaccgatgctctaggtccaagaaggagcctaagtgaagtggagagctgttgtaatcatgcaattagtctagctggcggaaatgacataagtacttccccactcttaaagaaaataaagtgttcagtggggttgtttatgtgagttaagttcttcctccaaattctccacctctccactgcctgaggtcggttccaacagagtccttcctggttactgcccatacatcatcctcaagacccagttagatttcaatcggaggactcaactttatcacacgctcaagtctcccttagctcatcagactacccatattttatatttactgtcttcttgggattttttttgttgagaagaagttattcattggaaaagtctggatgatgctgaaagtcatcttttacaatttaggcacgcagtagaaagatttacaatgtattttttgtttgattctttccagttgcctggagcaaacattcatcttctacttcctttaataggatctgacttgtgacatcatgttctgaaaggctgcagtttaatgcgtgtgttttctctctaacacacatatattatgcagagactctaggatttcatctttattttgttttattttttaaggccatagaagccagttgccttggggtttccttctcttagagacgtcgccaatgtcaaggaagcattctgaataggttgagctacatagtaaacaaaccccctacctaatgtacattcggggcttggcttgcaccagagtggcttgtcctgccagttgagtgcaacactgagatgccaacggtatttatcttcattaagtttccaaagcaatggcttaaaagtttgtgcacaatttgcaaattcagttttaaagatggtatcctcaattctgcagtttctggaatggtggcttccaggtatttggaaccccttgccaaaatgttgatcacagatgagagaataacgtgttgctatgctatgcagagaattgtaattcattatatactctctagggggaattacagaagtgctgaccatttgagaggaccaatgatcaccatttgagtaaagcaaaaatggtcctcagaatatcttaagatcgtgagtcatgaatttcttaaagttcagtgaatgccaggcttagtgacatatgcatgtagtcccggatactcgggaggctgaagtgggaggattgcttgagcccaggagtttgagatcagccttgacaacatagtgagaccctgtctcaaaaaaattagtttcgtgaaggcaatacctggcaatacctcctacttagatgggaaacttattcttacatgcttcaaagaagtcaaagtgacttttacagtgaacttttagtagtacttcttatgcctaatgccaaaacttattttatgacagagacatgtcatcaatcttttttctcttgttttcaagaaaggaaatgtcagtacaaatactaaggaagtttcaacatctccataaggtagggcatcttttagattagtgggacttttcagctccaagacaaagaagaactcaacccaaatttactttagaaaacatagctgaaaagtctgagggccatgctggtttcaggcatgtggctggattcagatgatgtcaatagaactttctttctctccaactcttattgcctccttcagtgggattgatgttgtggttaggatgcacgtggtgcacctggcctcctgcctcctcgctctaggctctccttcactgatgacaaatcggctgcagcacaacctcatagataaagtctagccagaaacagtcgccactccacttactcctgcagaattcctgagatctacttggattggattaactcttgaacatctgactgtggcctggagaatgtggtgtgctgaagtcaggctggatctcttctcaatccaggtagaccgaaagtggagaaaagtagactccaaacagaaatctagtatcttgctgaaggaagtgaggccaacaagatatgtttagtgcttgtattgtatttatcttctattggctgaattgcatccctccaagttcatatgtagaagccctaacttccaagtgcctcagaatttgactatacttgagataggacattaaaaaaggtgagtaagttaaaatgaggctgttaggggagccttattccaacatgtcaggtgtccttataagaagaggaaatttggacacacaaagagacagcacatatgcctgagcacagaggaaaggccacatggggacacagaaagaaggtggccatctccaagcccaggagagaggcctcagcagaagccaagcccactaacaccttgaccttggactcccagcctccagaactgtgagacaataggtttctgttgcttaagccacccagggtatggtattttgttatggtagccctagcaaactaatacagcatcttcttttattgtgtctagtcacctttattaatttggggatgccttaaatatatatttatatggtttctgtaatgactttatggaatcttgttaccattttgatttccagtaaagccaattgttaaattagtacttgaatttagtcctcttaaaagtcagattagaagccatattaaagaagagaaattattatttaactctaatgttgaagtagtgttgtttatttctgtgcttgttaatgaagagattcaaagattctatcttgtatcggttcagtgttcctttgacaggaactaatcatgtaagcttgattttaggaaacatattttgaccagatagagcagaatgaataaagcaaaacaccttggaaatgctattatctgaaaaatcagattcattaaattaagtttaggtcaatattcagccacatgtcaaataaaatataatctataatgaggtttggggaaaaaactaggaagctggtttttcgtttttatttttccatttcatttcatggtaggagttgcctctaagacctaacataacagaatttctgtggttggccagaagttttttattgatttctcctggctacagtgcaattttcccagcgtcatggagagaaacaggtagagaagtgaactccacagacttacagtctagagtcaagttgacttggaaaatatcgggaaacggtaaatgtgatactagaattcttgacagacctttagttgagaaagttgtggcagatttatagctttagataagggcccttcactggaagaaagtataggctacttcttttaaactttagggaaatacagtttattagactggtaagttttgaatgccttgtaaaatattagtcaaaaacctctatttcctgtgttatcttttgctttttaaattataaaaaaattaagtaaattttaacaaaaaaggaaaaaaatatgaaagaaagtgataattccattagtcattttttgtgtctaccctcccagagatttttctaggattatgcaaatattatacctgtcatatataactgccaaacagaatatttctcaagcatgaaacaaatgcatgctcatatgttgtatattctgtgttttatatcaatatacatatataatttaaaattaaaatgctcaatattttctttatgaaagtaatgcagttctagctcatttttcttactacttagcattgtgacaaaatttgcttaactaattccctattgataaagaaatttaggataattttgtttttaaaatattacccttaatactataactatccttattcccaaaatatttttgtcatttgacagtattttgataagatgaatttaccctgtgtcaacggttatcacatccttttaaaattgtttgacactctcaaaatgccctatgaaaatgttgtaggttctacactcccaccaacagtgtttgacggtgcctattttccctcacattggaaaatattaatgagtcaatgctctatctatattttcttacttaaatatccagcaaactgtatgagttagttattattttttccattttgcaagtaaaaatacagggaagttgggtggaatcttgccttgcaaaaggacacacaaacagttagtggtgagctggtgtggaagacaggctgtgtcccagagatacccacttatccactatgccccagatgcgattattagcccagccctgtaagtctgaattcccaactccctttattcaagcagcactttctcattgtttgctgtcatctcctgctgcttttgcttttattttgctatttttatttcgagttttgttggttaattttatgagttaacttgactgcatcaggaggtgcccagatcaaacattacctctgcgtatgtctgtgagagagtttctgcatgagattagcctttgaattgatggacttagtaaaatagatggccctccccgatttgtgtgggcatcatccaatgcactgagggactgaatagaacaaaagggaaagggaaataaattcaccccctttttcctgcctcactacttgagctggggcatctcatcctatcttctcctgccgttaggctgaaatttacactatcagttcccctagttctcaggcctttggactcagactaaatgatagtgcccactttcctggatctccagcttcaaagggcaaattgtgggacttctcagcctctgtaatcaagtgagccaattcctcataattgtgcacgttttctctctctcgctctctttctcatctctcttgctctctttctcatctctcagcatttaaagcaactgttattttgagtgttcttttaagaactcaaatgatatcctaaacagttcaataatagtctctcctttcagcattctgactttcataataagattttgtcattcttttaaattttccactgaaggatattcttagcttgaatttttcaagacctaaacaattaacacagaaaagggctgaatgtcagagccacaaaacaatggttgaaagttagcttttcaaatttattgtatttaatttctgttcatttgaatttagatagtgtaaatgtactgcagagtgcaatctttggatacaaatttgagagctagacacggtaatcagactttcttatgccgtatgcctttgattctgggagggattactttttgttgtggtgcttgttgttttatcagcagtatgaagaaaatgttttcagctgacacacacacaaaatacaccatttaaaaaataatgcatgatgttttcaatacttttttcaagacacataaaaatatcttgtttcaattattttagcagttcttttagctgctgaatatttgcttcgaggacctgcttaccccaccccctacccccaccagaaatgtgtctggtacatgaaatttattcctggagcgtgtgaacacttctattgtgttccattaaatgtaggatatctttatagcatgtgtcagtcataagaaaaaaataaactctcaggctctatatatgtgtacgccagcttaataaattctaggcaacagatgtagctgccagttcctccttctgccacttttccccagttcaataaagaggtacagatggttcttttcaccctggtatcttgaatcttggcatgagggctgggactttattgatctttttctggaaacttctttcgacccaaaggaccatggcaagctaagtgtcaaatgagattgtcttgcacagatctggccatttgggagtcaggggcccttaagagttgaaaaatagctcagagtacctctcagcctttcacatggagaaactgtcgagttacatttactcttcggcttttgattttttacatgctcatcttgcagaagcccagggctgggagaaaggtcatctagatcttggctctgccttaggaagagcctgtgctaatctttcaaaaaagcaagtgaatccagccatggcttacagttttccagttcaaccaagagaaacaaaagcaacctgaatttggtggtaacaaagaagtttaaaggatcaaaaaaaaaaaaaagatctcaaatgatcctattgaataaatgtagttttgtttcttctgtatagtaaatgctgtccttggaggatggacattagtggcttgttgttacccactggtgtcataagaggtctgtgaaagaactctgactaatcacacactgggacaatcaatataaactgggacaagcctgggtaacctgggcataggcacagaataacaaatgcatgtactaactggacactcttccaaatgcctctccatgccattttatttaatggaatatgctctgaaaactccccttttatatccagggaaactgagacacaaataggttaaataacttcctaaattcatgtaaacccagtgtattggtgagttttcatgctgctgataaagacatactcaagactgggcaatttacaaaagaaagaagtttaatggacttaccgttccacatggctggtgaagcctcgcaatcatggtggaaggcaaggaggagcaagtcatgtcctacgtggatggcagcaggcaaagagagagaacttgtgcagggaactcctctttatgaaaccatccgatctcgtgagacttattcactatcatgagaacagcaccggaaagacctgcccctatgattcaattacctcctaccaggtccctcccacaacacataggaattcaagatgagatttgggtggggatacagccaaactgtgtcacccagggagaagccaagtcaggagagatggccagtagccttagggagggcctctggctgagaaggctgctctgttttgggatatgagtgactggtccaattaggttgttgctctcagaaggtttgttatgacaaagagggacatcagataaaagtggagtagcagaggtaagacccatcacaaaaagacaggggacatgggattgagagaagagttgagagtgtcagcaatccatagttattagaagatgacctggttagttcccaggaggactgagcaaccaagacgagagtgctctgttgccacgggattatcttaaggattctgaatgacagtgtcctgatgtccatgagctctgcttaactgctaagggtgggctgcctgcctttcttctttcaaggtgtctgttgcacctggggtaaccttgagcacactgctttctcctaagacttggaagactctagggtgcaggaagccactccaaagggccttggtgtgtagccattggctgtttcactgaagctggaatttgatttttgaacattgtgagcctggggtgcagaggaaaatgagtgatctcagctgcctagtgagactgcataccgatgggcctttgcaatccacatgaagaaagcctgaatatgcagcaactttttctttctggaatatggccaaccagtgctcaagctcagggtttactccaatgctccgattgtctttgccttatgggagactgttctatgttaattggaattcttgcaaatgggattcatgaacgtctcaggatttatacctcccagacaccaaagggttctcacaatgggttgcaatatttttctgtggaaccctaaagctcttctgtgttgctgaaggggcactgtgaacacttgctgtattttattttaaaaactggtatgagttagtttgaaaacaccaatgacagcaagtacacacaagtgtgtcttagacaaactcgaacccactggagaataccaggatatcaaccactgctggcaaattcactctttagttaagaacatagagtttatggctgcatagtattccatggtgtatatgtgccacattttcttaatccagtctatcatttttggacatttgggttggttccaagtctttgctattgtgaatagtgccgcaataaacatacgtgtgcatgtgtctttatagcatattctcactcataggtgggaattgaacaatgagatcacatggacacaggaaggggaacatcacactctggggactgttgtggggtggggggaggggagagggatagcattgggagatatacctaatgctagatgatgagttagtgggtgcagcgcaccagcatggcacatgtaaacatatgtaactaacctgcacaatgtgcacatgtaccctaaaacttaaagtataataataaaagaaaaaaaaaaccaaaaaaacaaaaaacaaaaaaaccagaacaacaacaacaacaaaaaaaaaaaaaaaaaaagaacatagagtttaaagccataaggtctgctccacagactactttcagcgctccctccctgggtgacttggcaaggaacctgcattcttttttttttttttttttttttttgagacagagtctcgctctttcgcccaggccggactgcagtggtgctatctcggctcactgcaagctctgccacccggggaacctgcattctttgtgatgcatcgcctcacttgtaaaatgggtgcaataataatccctcactcaggtagctatgtaagaagtggatgaacttaaataggtaaaacacttggaaatgtattcagcacatagaacacacaaaatgaatgtcacttctcatttgtgattgtcattgctgctgtcgtgcagagctcagaattaaccttccctggcatctcattcatctatctgagcttcttgtaatgcattgttcatttagagtattgaagctctgccctagtctttaaaaaattaaaaatataaaactatgcatttccaattacataaattgttatgttacataaatgtaccctaattcagaactaatatgcactgatgattatttactatgcaaagacaggtgataacaaataaatgcatcatatattgaaatgctgtcataccattttattcacttatttatcaccatgtgtttattgttatttttcatctgattacaatgtctatgtgtcttctgtaattgttttatcttttaaatttacaacatatgtgatagacaaaataaatgctatgtactttatatataaacaatcttttacaaatatctctatgtagtttatatatgcatatattttatataagctatatataacactgcatgtttacatttgcatatagtttatatgcatatataaatatatatttaatgcaagtattcatttataaatatctagaaatatgtatttttatatgtacatattgtatataacatcatttacatatgtatatattttatacataaaatatctcaaaaatagagaaaagtacacagaacggtatatattacccagagaatagtgtctattatctagacataataggtatcaactttaaagatttttacctaactttttagagaaatgaaacactacagatacagtgactcctcctccattccctttccttctctatctgccacagcttccctcccttcagtaaggctagtttgaagctgccgtgtatcttaagcatctatcattttagtattttaacacaaatttatgtttcacaagccagtggtagtatttttgttgttaaaaattaacgtaaataatactttgctacgtgtatctttctgaagcttcctctatttttttgagatttattcatgctaaaataatctctatttcatttcattgctatgcagtaatactatagtaagaacatatcacaaagaattaatacatctctcaattgatatttataaaagttgtttacagtctttcattcttacaagaaatcatgcaacaattatgattgtacagacctctttatgtggaatgtgtgagagcttctccaggtatgcatgtaagaatgcaattactaggctgtaatttcttgtttcatttctgtatttattttgaagtatcaagcattcagtagataggcctaatttttcaacgttgaaacaaatttaattactacctcactctcacattttttaatgagtcagttgaagaaagactcgctagagtttgcaaagaaaatttaaaacattgtttgtgtttggatcttcttagctgtatgatccagaatttactcaatactgtagggcatacaagcaaaaaataggaataaattggatgatgaggatcatgatgatgaggatgatatagaccagtgtgaatatgttgtatttttcaaagccattgcattgcacataaaatacttaaccctttgtttctgaatatgtcctagattttattttcataatacattattacattggaaaaatgtataaaagacgaacagaaagtgaatcgcttccacacaattttaatctacaaagaaaaccactgctaacaatttggtatatggaaccttccagattatttcctaagcatttacaaatgtgtgtatgtgtgtgggtacctgtgcatttttttctttttaggagacagggtcttgatctgtcacccaggttggactgcaggggtatgatcagagctcacaaccttgaactcctaagttagtgagtgtttggttatttggtttccagaaatgaaattatcccactggagccctaccctacttttggttttgttcatcaattcctcagtataatctacttttctgaaggcattaaacaattgtaggcagatgaatgttgaatggcggggcctggtttcgaggataaggtattaatatttatatagcttataagcaagagatttcacatcaagaattcatattcaattgtgccaagcccgagaaatgatttttgtcttgaaaccatagaagaagaagaagcacacagttaattcataagagtgagagcaaacatgatttgggatggatgactgaaatgattaccactggtttagtacagaaaatatcctctcacctattaagcattttatattaattagggagtatgctggagattaaaactggaaaatgtcatagtgtaactgccatatgacctcacacctggttttcagaataacgacggaaagtgttgaaaaccacaggatatctatgaatcacctacagaaatgcgggaaagctattttgtaagataaagtttgaacatagtcaacaacatctgggggttacaggctctaaaattatgtcttttctgtgttctggaagttcctgccctcaggtcaattttgtaggtcccaagggcaacctgaaccaagtgtcagtactcccctttcatataacaaagtgggttcaggtttcctgctttcagaggtcaaacctcccacatcataaggttagtatgttaacctactcaacatttgcttacaagatgagctaaggcgcatcgatgtaatcgcaggaggcattctcaaaggaggaaagaacaagaaagcccacttaattccacataagttctcaaggatttcttaatcctatgaagcccatgtttctgggaatccaggatctgaggtggtaggaaataggatctgcatgaaaagggaagaaaaaaagaaagactttggtcttaaatgtttagcttgagaaaagacatgtttgtaacaaataaaccatgatagaaataagtgggttaagagaagaggagcagctgggcctggtggctcatgcctgtaatcccaacactttgggaggctgaggctggaggatcacgaggttaggagatcgagaccatcctggctaacacggtgaaaccctgtctctactaaaaatacaaaaaattagccgagcatggtggcatgtgcctgtagtatcagctactcaggaggtggaggcaggggaattgcttgaacccctggaggcggaggttgcagtcagctgagatcgtgccaccgcgctccagcctgggcgatagagcgagactccatcttaaaaaaaagaaaaaaaaaggagcaatttttatttcctgaattcgataaatgacaatgaaaagtggcggggacttcttaacagggcagctggtgaagatgactcacattaagaagcgcttactctgcacgaggggtttccctaggaacttgaaaagcatcatctcatttagtcttcacaacaaacttatgaaaagggtgctacattgtgctaattttagagccaggagacaggatcaaagtccttgagcaacttcttgaggttgtaccgctacccaggggcaaccttatcaatatcacatccatctggctctggggaactgcacccttatcctcaaagtcatagtgcttaccttacattgtattaacacattatctggtatggaagtaattatttagtcaatgatgtaaccatttaatgacggaaagaaccacattcggctcctaacacaagtttacatttatagggggaccacatgtccctcaccccgcaggtgtcctttggtaacctgtgcataacattttctaaaccagatacatatagggtttttttcatagggctttggatcataggattcttgtgattaacttggatccctaatttcagatttctggcttactagatgttgacgctctgaattttatgactttaacatggtctactagatgttctatcatttcttagccctaatttatgatgctgaagccaatcctagagacttctgccccagcagaccagtgcaagcaaaagaagggcatgtatctattttatgaaataagggtcagtgggatatttggcaaacacataaaattacggggtgtttgagttttttaatgtatcatctttgttgtgatggctggactccacaaagaattggcttcactgctatttatgctatgacaactttcattcttgtttttggtaatttttggttccaagtaacagagacttagtgaaatttgattatgttttagaaaaaaagtatgtgtgtttctctctctctctctctgtgtgtgtgtgtgtgtgtgtgtaactatttgagaggattgggatgtcttaagaatttaggagccacaaatacacacaggttcaagggactggaactggaaattatgaatttaaaaactaaaactatgcttttcatttttcaagagtcaagtgcgatctcatttctattcatctctgttgatgtaatttattcttccttgtctctgcagttaggccttttctgtttcttcaagcacttggcagataatggccaccctgaatataaattagtacagacattatgaaaaacagtgtgaaaatttctcaaaagttataaatagaactactgtatgatccagcagtcctattcttgggtgtattgaaaggaataaattggtaggtgaagagatacctgcactcctgtgtttattgcagcactattcacaacagccaagttgtagaatcatcctaagtgtccatcaacagatgaatggataaagaaaatgtggtacatttacataatggaatactatttagccttaaaaaagaaagaaatcctgtcattttcgacaacattgatactggaggtctttatgttaagtgaaataagccaggggcaaagacaaacactgcatgatctcactttttaaaaatttattttttttttaattttactttaagttctaggatagatgtccagaatgaggaggtttgttacataggtatacatgtgccatggtggtttgctgcacctatcaaactgtcatctaggttttaaggcccacatggatcaggtatttgtcctaatgctctccctccacttgtccctccccactgccccccgacaaaccccagggtgtgatgttcccctccccatgtccatgtgttctcattgttcaactcccacttatgagtgagaacatgtagtatttggttttgtgttcctgtgttagtttactgagaatggtggcttccagcttcatccatttccatgcaaaggacatgatctcattcttttttatggctgcatagtatttcatggtgtatatgtgccacattttctttatccattctatcattgatgggcacttgggctggttccaagtgtttgctattgtaaataatactgcaataaacatacatgtgcatgtgtctttatagtagaatgatttataatctttcgggtatatccagtaatgggattgctgggtcaaattgtatttctggttctaaatccttgaggaatcaccacactgtcttccacattgtcttccacaatggttgaactaatttacactcccaccaacagtgtaaaagcattcctttttctctacatccttgccagcatctgttgtttcctgactttttaataattgtcattcaaactagtgtgagatgatacctcattgtggttttgatttgcatttccctaatgaccagtgatgatgagcttttcttttcatatgtttgttggccgcatgtcttcttttgagaagtgtctgttcatatcatttgcctactttttgatggggttggttgtttttttttcttgtaaatttgtttaagttccttgtagattctggatattagacctttgtcagctgggtagattgcaaacattttctgtcattctgtaggttgcctgttcatattgatgatagtttctattggtatgcagaagctctttagtttaattcgatctcatttgtcaattttggcttttgttgcaattgcttttggtgttttagtcatgaagtctttgcccatgcctatgtcctgaatggtatgaaactggaatccttccttacaccttatacaaaaattaactcaagatggattaaagatttaaatgtaaaacccaaaagcataaaaaccctagaagaaaacctaggcagtaccattcaggatctcacttaaaaaaggaatctacagaagttgaactcacagaagcaaagagtagaatgtgggtaccagaggctggacaggaaggagagttaggaagatgttggtcaatggatacaaaatttcagttcgacaagaggaataagttcaaggatctattgtacaccatggtgactatacttaataaccatatattgtatacttgaaaattgctaagagagtggaatttaagtgttcttccacaaaaatgataagttctcaccacaaaatgaggcaatacatatgttaatcatttaatttagctattccacagtgattcatataccaaaacatcatgttgtacatatacataatttttatttgtcaattaaaaaaataaattctaaaagagttaaacaggttaaaaaaaaagctatcctaaccctctcataaatcccctttcaatctcagagcccacgtgagtctcttaaacccacttccacgatctctgtggtagagaatttggtggacctaacttggatccttgatgatcttatgtgagtgaggtccaatccactgccactcactcttcaggggttgttggaaacgagcttttcagaaaatgatctgggaaggttctgcttgtagagtaagggggtgaggaggaaagaggcaatgattggtgcaggagacggtggccacccctagtttacctgcctagacatgaccttgtacacatttgattttaaactatctaaatgtactgccagagcttacctccgcaagattcccaggtatcctatggggtgatgaataatgctgtttagaattttatttttgtattagagtgaagggatttaatatatgtaatgtaaatattgtaattaagtggattttgcatttagaatgcttggatttgcatcccaatgccaactcttactgagagttacttaacctctttacccctctgtatactattcaataaaacaagaataatattagtgactgccctacgggacttttctgagaagtaattatttgaacacatggatgttctttgaacagttcccatcatgtggggttctcaatagagttgttgtttggtaagagatttagtaaattatgagattttataattatgagattaaatatgcttagggatttttacatgttaattaattgaactaaaaatcagggagttaaagagaatatttgtgacttagacactgagagaaaaacaagcaagatgaaaaagaggagactgtggagtaattatagtctcattgtggtaagagagtggcttaaccaaatggaaaaagcgatgaattaagcttagactgtgcagcccactctccattggcctgtcatggcgtgccccctgctgtccctttaccaatatgatcatgagaaaagccaaatgcaaagtcagtcgactgtaattccacagagccatggatttctagccaacactgcctcagaagaaggttgaaaaaagttgagaagaaatctgggtggagggcacagtatggttcgaagaaaggatggagtgagttgtaaatataaggatttgttcagacatgtggcttcatctgttgcagctgacaactaccatttggaggaaatcttgtatgaaagatgatgaaactcttgtctctttgtggctttttaaattggcctgagtcccttgcagcgtggccatttctgcattaatttattcgacttcctgctcctggttgctcaagccttgctaaggagtagagaaaatgcaactttggttactgtaaaaacagtggatcattttctttaaaattcaaggccaaacatgttgagcattttatatacaaagaggtggccaaaagttttgatctctcaaacggttttgtgggtaaaatgaaataatatctattgaatctatttctaaagtgttagctcttccatcttccctctccagagcactcagccaagttacagctcatataatcttgatacaagagcgagtgaagtgtttgaaatatgaacatttctgatctgaatctgaacagatcataatatgtttctccctgttttgagttctccaatttcttaagaaaattattgaggaaagcggttttgatttctgatccttaccagaagcaagtgacacatttaaccatatgctttttaccatcctcattgtttttctcctttgaacattggggtgtttgccctcatgatattgaaaccctcagtcagctcaaatgacacactgaaaaatcttttgtaggtttcgttttcaaataaacattttagaattatttgactagtaacaggaataagctgaatttctgagaaataaaaaaataaacaacatcacctgcagagacgtctactttcttaacaattgaattcaaatatcaggttttatcgttattatcttttaacctaacaaaatcccacaagcaccttaaatagtgtttttgcttatttggttttaatgatgttgagaaggtaagctttgataacagaataggtttaattttgtgcttggtaaagttttgcttaaaatgcatctaagcaattgtttggctccttgaatcatttaatattaataaaatgttttgtagctaaactattcttgtggtatttactaaaagtcagtttttctgaaagagaagaaactaatggagatagcatatatcaatcatcacccatcatactgaaagtttttaagaaaatatatcattagggataactctttaagaacatacgcattttgtcttctggccgggggcggtggttcacgcctgtaatcccagcattttgggaagccgaggtgggaggatcacaaggtcaggagattgagaccatcctggctaacacggtgaaaccccatctttactaaaaaatacaacaaattagccaggcgtggtggcgggagcctgtagtcccagctacttgggaggctgaggcaggagaatggtgtgaacccaagaggcggagcttgcagtgagctgagattgtgccactgcattccagcctgggtgacagagcgagactccgtctcaaaaaaaaagaaaaaaaaaaaaaaagaacatatgcattttgatgcattttgtcttcttcatatgtgtatctctaatacctagcatgctgccttgcacatagtaggtgctcaacagataagtgcagtgttgaattgaatataattcgaacttagatctcccagtatactgaaactaaaacattaaatttagacatacatgtataatgaaacgttaaaggagatatgttttagctaagaaaggtgtgtgctatttatttatttatttatttatttaatgtttttagaaatgaggtctctctctctattgcttccctgtcacccaggctggagtgcagtggtgcaactgtagctcactgcagcctcaacaagtgatcctcctgtctgcgcgtcctgaatagctgggactaaaggtgtaagccactgcacccagcaggtgtgttctattaaaaatattggttttgtaggtttcacaagagaatgattttacactggacacacagaaaataaattacgttggcctacgttaaaaggggtccaaaacctagatcaacatttccttcttttgccacattcatgaagctaatattctttaaatgcttactatgtgctaggcactttactaattacaatgctaaatgctttttatgcaacatctcacttgttcctccctaaagcctcgttaggttgttcccttttaccgcacacattctcagttccatgcctgtatctcttggatcttttggcatattctagccttctctgtgtgtgagagttcttcacccatccctaaccttcacaaccaactacaggaagccttgctgcccacacgagtgttcagccagccagatgtggcttggatttaatagccctggatagcagccctcacccattgactttcatgagttacaaatttcctgagaatagggtgattctcatgcttgagttttgcagtagcaccatttctcctttaagggattaagcttccgttgcccattgtggtagcagagttaacatcacactgtctgctggccgcctttccttccctctaccacctttccacttcctcctggtgctctcaactctttccatataacctgcactcaaagctgtagctcagggtctgcttcttggagcacatgaagaaaaacattactattatcccatttttgctgttgagggccttcaagctcagagaagtcaatgaagttgcacatagtaacatggctagagagtggtgaaatcaggaatcaatctaaatttgtctgactccaaaggcaaaattaagaatgaatgggaagttagtgggaattctctagtgtccacataatttagatatgttatatgtggagaaagagagctgatctcttgaatgagtctcatttgtttgctactttaaatgaattctccagatacttttaaatttttttttttggttacctgaggagacatagtctaaattacaagaggcttaattttttttttatcattactcattagaaaacactaaattaatactgtaagacttcagattcatcagattagaagaaaggggttcataatgataatcataattataacagtaataacactagcaaatatgtgttgagtcttcctccatgccaactcctaagcttacggctttacctggattctctcattttatccttcttgcaagccattggtagtaacccatttagagatgagatatctgagaccaggctaggataagtgctttgcctacggtctcacttattataagtgtcagaactgaaatttaaatccagatggtttggttttagaaaataccttctgtgaaggtaattttctttctgctaattttctttcattttcattgaatattggcctctactaagagtccagttaatttattaattaaaacctgacagattctgaaatagtgacttttgaaaaccatagcaacataagactatttggaaatagaagtcaagttcctaaaggatttttaagtgcaagcttttattctcctttcgtttataattctttttttagtcttcccaaacctcacccaagaagtacttgttccctggacctacatgtccacactttttttttctcctaagctatgaactagtttctctgtgggcagtctttctctgagggcctgaaagaagtaaatttttagtgtgtgtttgttatatgtgtgtgtatacacaagaaagaggaggtatacacatgtatgtgtgtgtatatatgtatcatttgtatataaacaaattttatgtgtgtatataatttcttggagaaaatggaaaatttagaacttttaagcctttggatagatttgataacttgggctttgtattacggttcttgctatttgtgatatctatttaaacaatgtccgtatatagagagagttcaagtattggttttggtattctctgtttattcctagaatctgtataccttccattattaaattttgcatagaatgtaagcagtgcttctctttcggataaatattcccatttttcatgtccattatttgacttaaagtaacacccttgctattaatgtttaggaataattcttcatattttaattaagtattgtatatcagacactgtgcttgattatacatgtattatagttataccaaccagtatttattgagtgcttgttttgtgtcaggcattgctttaggtgttgaaaatacagaggtgtataaaacagggatggtctttatcctcggagagcttactattttatttagctttccacaatcttttaaagtttctaagatgattctcatttggtaaattgagaaactgaagatcaaaggggtttaattatttttttaaatttctaaaactggcaaaatggaggaaccgggtcttttttttttttttttttttttttgagatggagtcttgcgtcttgctctgttgcccaggatggagtgcagtggcacaatctcagctcactgcaacctccgcctcctgggttcaagcaattctctgcctcagcctcccaagtagctggaattacaggcaccctccaccacacctggctaattttttaatttttagtagagatggggtttcaccatcttggccagagtggtcttgaacacctgacctcatgcctcccacctgcctcagcctcccaaagtgctgggattacaggtgtgagcaaccgtgcccagccaaggaactaggtcttgaatccaaatttagttggctgtaaattccaaattaattctaccatcttgggtaacaaattgatgcaaaataaaagataggggctgggcaaggtggctcacgcctgtaatctcaaaattttgggaggccgaggtggggggaggggtcacgaggtcaggagttcaagaccagcctggcctacatggtgaaaccctgtctctactaaaaatacaaaaattagctgggcgttgtggcaggtgcctgtaaccccagctacttgggaggctgaggcaggagaatcgcttgaaaccagaaggtagaggttgcagtgagccgagatcccaccacagcactccagcttgggcaacaagagcaaaactccatctcaaaaaaaaaaaaagttactgaacaatgacatttttaaatacattggtggactagaggaaaaaaaagatactaagaaacaattagaagctaatgaggccccatctttgaaagataaacatggtgtagtattttcccagcattttgattacaattcatgacaagaaatatattttacattgccactcactatacctatacatgaatatttagatgggcatgtatgtatgtatatatgtatatataaatacacatatgtatgtacatgcctatataaaacactagtacacaaaataacatatagtttacacagttctgatactttcagttgttttattttgtatctcatttcacagtatgatgtgttacaatgtgcagttgaacattaacataatcagcagaaaattgaaaataaattatagttatatacaaataattatgattcatacgtatatacacccatatttcactagttataaacacatgttaaagagatattaaaatactatgttttgtggagtcaatgtttctgtgctcccagaattcatatgttaaacctcatccccaaagtgatgatatttggagatggggactttgggaagtgattaagtcatgcaggtaaaacccttgtgaatgggattagtgtcctaaaaaaaagaaaccctagagcttcctcagctcttccacccataaggactcagggagaaaacagccatctgtgaaccaagaaatgacccctcaccagacactgaacctgcccatgccttgatttccgactttgcagtattcaaaactgtgagaaataagtttctgttgtttataagctactttataaatgttatatggtattttattatagaaaatcaaactaagacactatgggtcaaaatatggaaacatcaacaaatttttagctctaagggcaagatacttagatattctcagttatttgataattctttgaacaaattcattgaacacataccgtacatcagaactttcagcttgttataaaacaaacacagcccctgacctcatagcttaaagactagtgggaaaacaaatatttaaagaaaatgtacatgttaaatatataattaaagattatataaaatgttgggaatggaaatagagaatgttgaattaaaatataagagggatctaaattattttatccatgctaaagaaaatttctaagtaaattgtaagttgagattcatgggaggagttggacttaaccaggtgaaaaatggctaaaaaaaattaaaaacggagaaggcaacagataaagaaggcctgaggctggaaggaacttgacgtgttagaaaatgagaaaaatcagagaataaaaccatcagatagtctagagagaggcagaaaatgggtaggcatgaggcagaacatgtattgtctaatagattcagttgaagatattttactttatcctaagcatagtgggaaagtgttgggtctttgtcaatagggatatgtaatgatttgatttgatttaaagatttttctgctgctgctgaaaaatagagtgagaaaaagtagaatgaaggcattgccagatggtccctgaggccactgagggtcagggaatctgtgcttctgttacatttatatgatcaaacatccaaataattatctcagacagcttctttcttcttttttgtcttgttgatgatttggttttcaattgttggtttggttgcctagaaaaaagatttatggtcatctttgatgccatcagtatggcttaatggaattaagttcatggaatgaaaaatgctgattgggcaaggctgggccctatgtctcatccttcttcacccactcagctgtcagaattgggtgggatttacccaaaccacctagactcagagaggtagagtggtcacttcttttatatgacccaaggtgattggctggtactatatcttcttctaatttctttttcaccaaattagatatgacaggggtctgtctatctagcttttaggaagttgaggcatgggtgggatcacattgcttagaggagagatcaggttcattgtaaactagctttgcttaacaagaagataggctttcaagaactattaacaaaattacctctgttcctaccattcagaaaagctatttagcaattatatgttgatgtataaacattttttaatctcttcaattgttatagaaaatggaaagtgactagaaataaatgcatgcctgatatttatttcaaaagtccttacttccagagctgcttcagaactaagaaaaagaaaaacagaaaaaaactggagccaatctcctcctcctccctcatctatcagtttgagatataggattttatcctgtgtaagatcctaactttgtaagacaatttatgatattaatatttattatggcagcaaagtagaaatcttcacttagaaatatttttaaaaaggataaaagctaaaattattttagttattagtcagaatttttctgctttcaataaacagaatctcctccttaatctggcccaagggaaaaaaaaaagataaaaatccactgtcttttataattcaagagactcagggttagacataatgtcagctcaatctatggactcaagtagcattatagggatttttctatatctttttgccctggtgtgtgtgtgtgtgtgcgtgtgtgtgtgtcacgtgtgtgcccaagagacttcttgggcagtctttttccatttgggggcaggatggtgatcagctgctccaagattacatttcgccatcctgttatgcagctgcgtttccaaaagtttcagcaaaagtcctaaaatcgagtataattgcctcgtgtgggtcatatacccatctttgaagccattggtatgaccatggaatggaaaacgctgattgagcaaggctgggtcctatgtctcatctttcttcacccactcagctgccagaattgggtgggaattactcaaaccacatggactcagagaggtagagtggccacttctcaagggataatcaactcttacataaaatcaactttctttttttccaatggatattgtttaattgaaatttgattacagtttggttatagcagaagttagatgggaaggagtattgaatcttttaatcattcagcctaacataaggaattttgtctgatgaatcacagtattaagctaaacaaatagtggatgtgattaataaaagcaaaaagcagtgagagctaaatgcagtctccacttcagtgtggccaaggcctttgactcattgtcattgaccttctcaagctttagtcaatccagttggaaattctgctaaaagtcagtatgtcaccactaagcagacattgagtttgaagtgaccttttttgagtaaataaattagaaaagacaacaaaattaagcagcgaccttgagatagccaacacagaaatctgtatggaggattatatgatcttccagtttctggcctttatcccattgtcctccagccaccagataatttccagcttctgtttctatgctttgtgagggcttgacatttcaatcacaaatttgaggatgtgagcctctgagtttacctgttgctgatcttcattaatgtttccagtctatgatggtttcgtgttatggtgtccatggatctggaaatgggaaaggagatgaagagtaaagtgatgaagaaactgggtattggagtcaggcatgccagggtttaagtcatgcatctgccactttcttactatgtctttgggcatgggaaagatgtttgaatctgtttcctcatttgtcaaatgatgatttctacagtttttaccttagagtgttgttgtaagtgttatataagataattcacttgaatgcttagcaaagtatctggcacataataaatactcagaaaatgaaagttgctataattagagaatgatacattgtttcctattaagggtggtgtcaacttctcttcaattagaaccactagacagacaatccaactactgattatcatgtgagccataaactcacatcatcacagtaggatgtacccattttgttttcatttctcacgagaaagaggtgaaggtgaatagaagtcgagaatggcatgatttccataatgagatgataacgaaaggcaagaatggcaaatcagctttattaataccatggatgataaggatatatgaatactttcttaactatcttttttacatgaacacttagcataggaagcgcaaatgtgagaatggagtgctttattcctccatttatgttcatatatactcaaggataaaatgaagattaaatgtagctttcatgtatccctgccagtggatagcggcctgcaagcttatatcctccactacaatcgatacttggttgtggaatgcattatttagtttgactctgttttgtttcagcagactcacctaattagaatttgctgaggcttatgttgaaacaagtgtgaatttcctaagtatatcccaatcagcagtggaggaaattggcctagaaaactgtttggcagaaggataatggcagactgggataacgaatacatcaaaaattatttgcatatggataattgagtcttgactgtcaacagcagtcatttatgctcttttgccagaatacccaaatatttagtcattttaccaaactaaaaacagaacagtaaaatctctgggggaacccgcccaaaaaagagacaaattattgcttgatgaggtacatagatgccagctagttatttgattgtttctttttcacctggaaaatattagacaaagcattatttaagatttctaaacatgtgcttgataagacaatgatataacctattccaaaatcttttgaaattaaaataaatttatatatgtttatatatgtaatgatacatattgattaacacttagattggaatcttcatgagtttaaaatttaattgacactttgtattccttttgccactaagcaagataatttgtatgttttaaagttggtggcatcacactacctgatttcaaactgtactataaggttacagtacccaaaaccgcatggtactggcgcaaaaacagacacacagaccatggaacaacatagagaacccagaaataagactcacacctgcaactatctgacctttgacaaacctgacaaaaacaagcaataggggaaaggatcccttattcaataaacagtgctgggataactggctagctatatgcagaagattgaaactggaccccttccttataccgtatgcaaaaattaactcaagatgaattaaagtcttaaaagttaaatcccaaactgtaaaaaccctgaaagacaacctagacagtaccattcagcacataggcatgggcaaaaatttcatgacaaagatggcaaaagcaaatgcaacaaaagcaaaaattgacaaatgggattaaactaaagaacttctgcataggaaaagaaactatccgagtaaacagacaacctacagaatgggataaaatatttgcaaacgatgcatctgacaaaggtctaatatccagtatctatgaggaacttaaacaaatttacatgaaaataacccataaaaaagtgggcaaaggagatgaacagacacttcaaggtatgacatatatgtggtcaacaatcatatgcacgaaagttcaacatcacaatgacataccatctaacactggccagaatggctattaaaaagtcaaaaaataacacatgctgggtgacgttgtggagaaaaagaaacacttatacactgttggtgggagtggaaattagttcagccattgtggaagaagtgtgacagttcctcaaagacctaaagacaaataccattcgacccagcaatcccattattgggtatatacacaaaagaatagaaataatcatattataaagacacatgcatgtttatattcattgcagcactattcacagtagcaaatacatggaatcaagctaaatgcccatcaatgatagactggataaagaaaatgtgatacatgtacactatgaaatactagcagctgtaaaaaggcatgagatcatgtccttcacagggacatggatggagccggaggtcattattcttaacagactaacacgggaacagaaaaccaaataccacatgttctcacttgtaagtgggagctaaatgaaaatacatggacacatagagaggaacaacacacactggggtcttccagaaggtggagggtggaaggagggagaggatcagggaaaatatctaatgggtactaggcttaatacctgggtggtgaaataatctgtacaacaaacccccattacacaagtttacctatgtaataaacctgtactacccttgaacttaaaagtttaaaaaatttgtttttttaatgtttttgagactatattaatgttaggatataattttttttcttcaggaatatacaattttagtgatgtttgaactaccatgatttggtttccaacttttactttgtttgcaattctatatggcataccaagtatatggcaatctctttatctgggtgtagatagatagatatatctatatctgtatacataggcatctctctcgctctctccgtatatatatattatgtatatgttatataaatgtatatgtgtatacacacacacacacacagaataagatatagatatttatttggatgtctgtctctcactctcttttatatatgtctctgaataaatatttatatatcctcatacatatatatgagacagatgggggtggggggagagagaagagctatcttttacaggaaagtttatcaatttgcccatgggataatttggttattttattgtagggctggaatttgaatctaagtccgcctgcttctgtagcttgatttttccaaagtgtgccacttatattttggtaaatatgagctgcgttttcacggaacacagacataacattaagtagcatttaacgatgataaattgattttttgtcaaggtcaaactcttagtttggttccagtgggtatttaaaaaatgttttaactgtcaaataattgtatatatttatggggttcaatgtgatattttgatatatgcatacactgtagaaagattaaatcaagcgaattaacatatccattacctaacatacttattattttttggtactggaaggtattaatccctctttatctcttaatctccatttttaacactgatgattgagcttaggcagtcaatacaacctagggagaatttaatcacattgctttatttcagtttaattttatgtctattttctatttgtgttaaataatacttatattttggtttgtttgtaatagtttagaaacatagatatttaaaaatcagttactgtatcaaaaatatcaagtcaatgaaaggatgttgatatgcaaactttataacagtggctctgtatgaatgaataatgggaaatcatttcactttttggcttttgatgaatgctactctccagacacatgcgtacttttctccatgggaacaatacactttgcaattggcatgccttaccttactgtcttctttctcttccccctttgtcatcataattaaattctacagttaaaacgttaaatttaaattgacacaatgtgtccctaaagttttcctttatctcatggcaagaagtgttctccttctgtttccctggacagttttgtgccataagtctttccctactttgtatatttccttgtaaatagacatgtgtttttgccttttactataccttcacatcttgagggcagtatccttgtccagtacatctgtctgtgtggaccaacacctggaatagagatttaggcataggagatactaaacagacatttgtggaaccaatacattcatatgtgaatgaataaaggcagttgaattacctacttgattcatcaggcacttcacccttttgcaatgactacatctcaacttcaggaacattcaaaatttgctttttagggtacaaaataagcaaataaataaccaaattaaatttttataatttataaaaaaggaagataactgacttgagttttccggtatgaacaccagttttctctaccattcactagaggtattttctttttttttttttttttttttttttttttctgagacggagtctcgctctgtcgcccaggccggactgcgggctgcagtggcgcagtctcagctcactgcaagctccgcttcccgggttcacgccattctcctgcctcagcctcccgagtagctgggactacaggcgcccaccaccgcgcccggctaattttttgtatttttagtagagacggggtttcaccttgttagccaggatggtcggtattttcttaaaaaaaaaagaaaagaaacaatttttcctgcgtgtgatggtctcactgtgctccctacaaggggatatagcagaaggaagacaatgaagagagatgtagctcaagtttgtggaactgcaacagtttctctgcttgcttagcattcctgatgctaaagggcatactgtagaatttaactgttccttaataatccttgagaggatgtggctgctgagtggggaggaaatgctattcctcactagtccactgctctttcttgtagccgctcctttgtttcaccactgctacaattttttttctgcggctctatctcctttcttttctgtcagtaagatgattcccaaaataccctggggtatagtcacacttctggatgttcattatctctagatgccctcagctacagatatttattttctgcagacctcagtctgcaaacaaagaaaaaaaaataaactctgctacttgttacggcagcagggcaatctaaactgtttttctctttctgaggcagttcagaggcctcagtgtctgtattttttccctctaggttttctgtttctcaaaagtgaaattatatgccagtgaccatttttcatgccaccccacctttctcaataatctggaccgttggctattccagtctttccttcatcattgctgcaaagccacttataatacgaatgaagattgaatttatggaaattgttggttttgagccaaagatgcttgaaaattaatgagtgggattttaaaaaactgagaaattacttcaatgtgctaccttttgaaaaccccacagtcctttttataaaaaataaacttaagaaacagctcaagttatttgaattcaaatcagatatctgagattagggttgcacaatttgcttttattccatggatgtgtcaaagtcctagtctccactgcctccatttttattcttagggccaccattgtttcaaataactgatcaataacaaaattgcctacattcaaacgacaatgttttatttctctagcagtaatttagtaaaatgtagtaaatagcaaaataaccagaaggaagaatcagtaggagaaaaaatagggaaggcaatctgagtaatcttttttgttgttgctggcatgtaattgcttaatatatatacctcatgctttaatacaattttgcccatttgttgtaaatgggccaggcatggtggctgtcacctgtaatcttagcacttcaggaggctgaggtgggaggactgtttgaggcaaggagttcaagaccagcctgggcaacatagtgtgaacctgtctatacaagattttttttttttttttaattagcctgatgtggtggtatgtgcctgtagtcccagctacccgggaagctgaggcgggaggattgcttgaacctaggaattcaaggctgcagtgagccacaatcacatcactgcagtccagcctgggtgatagaacaagaccatctcaaaaataaaaagttactatgaatgcttaatggttagagtaagttgttcactgagaatgaagaaatgacatcaataatttcccattgaaaagtagtttattatatataattgttttcaggtgagtaagagaaactctactatagtggattagccaaatgggcatttattttttcacatagtgagtgggctgaagaaatccaatagtgaaaaggtagctccgtgattctggcgtagattcagtttgcatctgtagctttgctttgctttcctctgccatgtagcttttacctttggtctcagcacagctgttgaagctaccgccattgggtgtgcattccaggcaggagaaaggcaaagggcacttaccttaaatgctatccaagtctatctcttttcttcaggaaaatgacagcttttcatgaaggctgcaatacattcccatttccttttatagatgagaacattgtcatgggtctatgccttattgcaaaaagtttgaggagctgtatctttaagcacatcactacttagaacaaagtcagagaaaaaatacttggacacaactaaccatgcctgcttaatgtataaaatcaacatgatgttgatcagggcagaaaaaatgctaaattatttcagattaagtccctgatatactttatttaataaagaaaatgtcaacgaatagaggaggcataggaaaagcatgttcatgagaaatatgggcagctcccaaatgctgccctggagagaggagctctcagttcaagggccttgtgcttttctatgaagatgatgaagtgtgtgtgtggggagggggtgggggtagggggtggggagggatgagaaaggggaccaagagggtttacagttctattcctatggcgttatagagactggtttcctagctttattattgactggttgtatgatgttaagctagttactgattaggataacacctacctcattaggtggttgtaataattaagcaaattaatatttgcaaaacatttagtacagtgtcttttacctaagtctttattaaataagtaaaacaatacctatcatggaaggaattgatttatgctttgtcaaacatcaggttatatctttatcagattcagtatgtcctgttatatactatagtatccccagcctctacatattgttagagttcaatcaatgctgattgaattaatgaatgaatattagctgacactaaagcatttttgattcggttagctctacatgtttgttgcatatttatgaatgatactatgattcctaagtaagcagttgaagactcaaccaatggcctttgattaattccagtttatataagagtataaactatatatgtaaactaaatgtatatggtatgaatatatatatgaatgtaaatgtgtatacacaaactacatggtatattcataaaatgttttctgattctgattatttttattttgacttgattttgcatggagcttaacttttacttgatagcaatggtaacgtctcagtacactgacccatgtattgttcatttgacagctggactttttctctgaaattaataaattgtcattctgctatctatcctggtcatccctacatttgactgcataagtagtaagatgatcgattcacagtataactacattatctttctacatatatcaaaacatcacattgtaccccataaatgcatacaattataatttgtcaattaaaacactgttaacaaaatataaataaataatagattaaataaataaatgaaaagttctcaatgcagaatcaaattttgtcccttgtgttttagataaaggattgtagacttgcatttgcttggaagacacttatatatgtagtaaagtagtagtatagtctggttgttaagagctagactctaaagacaaaaagccagctctaccatttatttactgtccatgacctcctgagaaagttactgagccagtttacgcttcaatttcctcctctgtgaagttaggctaataacagcacttaactcattcatgcagggttattgtatgaatatatacatagtgcttaacataatacatgaaaaagtcctcaacaagtgatagtaacatgcgcagttaaagcacatagtattttccaaatttgttgaattcatggatgaaaaaggatactcaggatcgatgctctacatgggatttgttcaacagacagctaccaataaggaatagaggaaaagttctaataatttatcttaaaattcagatgtttaaaatacataccctagaccaataaccactttgcctctctgaacaaatattatatcgccaggtcagcaaatatacagggattatcctcaaatacttactcttataattgggactttataaactgatgttcagtttagatgagtacaataatttagtaataaatatttgaagaggaaaaaccaggccactgtaagatgacactgtaacatatccaaatatgcttgttccttattaaacatgcaacaccaaatgttccttgttaaaataaaatatttcattgaacatcttagtgtataaattattgatgggctcattttaacagtttcctagtggaattctaatctgattttcatctgtagggcacagtatcctttttctgaataaaaccacctccaggtcgtcagtatttcctctaactattggcattatatgacccctccatggagttaacattggcttagttctatatttcccaagtacttaaaaaaaattgggttgcaatcttgtttctttgctgatgattcaagatgattcttttaagaaaaaaaatttgtaaggctgatcttctaaatgtgtttttaaacatccactttacattattttcgctgctcaaattcttaaatgtatattcttttctgaaaataactgaagtatttgagacatcagtttgttactcgtttttaaaaaagtaaataacattgtctcccttgagactttcataaattggacttgaaatatacttattttgaccaggtatttatttgcaattttctatttcagaataaatttgcaaaaaaatacagagcagcaataactaaaagccttgggagaattaatttaaatatcttcatgggagaaatgtagttttttcctacatcatatgaactttttcaaaaaatgacctaatgagaattaaaaagattcctggtatgataatattcagattttaataagaaggtgttagtggacttcaattatatgcctttaccggcttaatagaatctcaaatagtcaccattaatgccactccactggtcaacttaaaactgacattttaactgggttaagccacttgttaactggcaggaaaatatcaacgtcagataagtgtgtctataaatagtaatgctacatactatttacgaccacttctgttacaactgtgtatcaattaccttcttcatttctgtgatcttaagtagagtatgtaataaatacagttttaattgcatttaccttctccaaatagttatattctgaattatatatatttttctgactaaaaatacttgaaattttatcagaaaacttttgcatttcaaaagacacaaatcaagaaagagaaaaaccccacagactgtgagaaaatattttctaatcaatatctaagggatgtgtatacagaatacagaaagaaatcttacagctcaataatgagaaagcaagcaatccacttcaaaaataggcaacggatttttgaatggctatttccctaatgaagatataatagacgaatgaccagtatttacatgaaaagatgctcaacgtcattggtgataaagaaaatgcaaatcaaaagcacaatgagatactacttcacacctattagaatagctgtaatcaaaagacagacaataacaagatttggtgaggatgtggggaaattggagctcacatacactgcaggtaggaatgtaaatggtggcgtcactttggaaaacagtttggaagtttcttaaaatgtaacaatggaattaccatatgactcagcaattctactcttagggatatatctacaagaacggaaaaatatggctacacaaagattttcacgtgaacatccctacaagctttgtttataatagccaaaaaggagaaataaccgaaataccatcaaacattggattgataaacaaaatgtcgtatatcaatacaatgaaataatgttgtccaaaaaaggaagaaagaactaatttatgctactacatgtacaaacccccaagacattatgctaagtgaaagagaccaggtatgcatattgcatgattccatttataggaaataaaggcagagcgttaaagatagaaagcagattattggttttttagggccagggtgggaatgagcacagggtttctatttgaagtgatgcaatattttctaaaattagattaatgtaatggttgtatagctctgtaaatacaatacaaattgttgagtcatacacttaaaatcaaggattttatatggcttgtaaattatatttcaataaagctgttaaggaaaaatgcctgaaaaaaatgcctgaaattttttttttttataaatacagaaaatttcatagaagaaatataaagtcatccataatcatcctgtttccccaaattgttactaataacaaattgctgaattttatgtcatttttcccaaaatgattacttctttcatataagctttttgcacttgaagttcctaatattgttattacatttgcacattatttataatgactatatagtattacatgttagtatctatcacaatttattgtttttttttcttttttattgcaatgtaactgcaattgtctgatgggttcctcttgcccactgcacagataaagccaattaaatgacactgtggtgttgcagtagagaaagagtttaatcacaatgtcagccaagcaagaggacaggagacatttctcaaatctgcctccctgaaagctcagaggccagggttttaaggataattttgcaggcacggggctagggaatgggtgctgttccttggttgggaatgaaatcataggtgtgtacaaagtgtctttgcatgctgagtcagtttctgggtgggtgtttccaggtgggattcagttccttgctgtgagtcacaggtctgagtggagccagtgagacgccagaatgcaaaaatctgaaaagtatctcaaagaccaatcttaggttttggcaattgtgatgttatctatgacagcaattggagatgttacaaatcttgtaacccctggttgcatgacttgagcaggaagggactatggaaaagcaagctagaaaacaatggctggttatcttttaactacacttacattttagtagacatcaggcctctcccataatcctaaccttgtggcctttgaatagccttacaaagtcggtttcagtcccccagtaaggaaggcattagatctgggaagggactgttatctttgttttaaagttaacaaaggcagttagcttttgaggttagaaacaagatggaggcagctatggcagatttctctcactgtcaggatttttgcaaaaggtggtttcataacctatgtgtagtaaagtacacacatatcaaatgtacatcctgatgcatttttttcatctgtgtactgtgtgtgactgacagacagttaaagtcctctagtgggtttcacgtgccccttgccagtgaatactctcactccttgctgaacacgaagcactattctgaactctgttgtgacagattaatttcgtctacttttgaacttcacatagatggattcatacagcatatgatcttatgtatctcttattttactcaatatcacatttatgagagattcataactgttttttgtagtagtagtattttattcattttcattgctgactagtattttatagcataaattgattacaattctattattgatgaacatttggaaagatttccagcagcattggctataacgagaattctgttataaacatccttgaacatttcttctggtggacgtttgtactgacttaactatgtacccattgtgttagactgtttttgcgttcctataaaggaatacctgatattgtataatttataaagaaaagagctttaattggcccatcgttctgcaggctgtacaggaagtctggtgctggcatctgcttggatcctggtgaggcctcaggaggcttccaatcacggtggaaggtgaagggaagcaggtgtgtcacatggtctaagtgggggcaagagacagagcaaaggaattccaagactcttttaaacaatcagatctcatgtgacctaactaagtaagaactcacttaccacctaggtgatagtgctaaaccattcatcacggatcagcctaatgatccagtcacctgctaccaggcatcacctccaacattgggaatcacatttcaatgtgagatttggagggaacaaacaaccaaaccacatcaaccacgaagggagctcttagcttgcagaatatgtatgtttaccttagtagaggctccaaacagttttccaaagtgcacagtttattatttgatttagtttctgctgtattgtttgttgtttatttttcttattataaataaccatgaaaagaaaaatccagattgagctatataaagggatatttgtttgaacaaaagcaattatctttacaaagtttgtggtagatttcattaagtagtcagtttttcactccaatctgtttttcactttcagtacagtattaaacaaattacatgagatactcaacactttactataaaataggctttgtgtttgtccatctatataaccaagagagaggttctctgaaagaaaaagattcttattcagaagtagggcattgcaaagagaatactcacgtattctatgtgtgtattcatgtaatactcatatattcataaactatgtgtgtattcaggtaaaggaagacaacggtttttaaagaaaatattgaggaggattacctaattgttttgaaattattatgcttggctacaaagacccataacaagcattatggcagtctatggttggacaggcagttgctgggcagatgttcttgcagaattgtttttttttgtacaaggttttgttggcctttctgtaaggttgaaatttttgcagagctttttttgatagtttttgttatcaggcatacaagcatgagaaatctccttcatggcctttcctgggctctatttgtcagggtttggtttttttttttaaacactagttgctccatctttgttctgataactttgacatgttagatgatttggctgaagtgtaggctaatataaatgttctgagcatgtttaagaaactggaggggccaaggtaaaattcctccttcaccctctggagatttgctggaaatcaactgtcaaaaaccacatgaatatgagaaaatccatacaaaaatttattttcatgtgtacagcatgagggaatcacaggagaatgattatccaataatccaatgtgatgcagaagcttttatactctttcttgtatgggagtggggagatggggaacacagatgattcttttaagggacagtaagtcattagggagtgaatggtctggggaggtgggaggcagacattaagggaagatgagggatggagctgcacaggaaaaagattgttttacaatgcacataaagccccccaggtaatctcttggtgctactctctgaagaatagataaaaagtctgtatgggtgaagtgatgactatcagttgcttctctcctctggtggttgatcttttctggtaacttgatgagatcctgagggagggtgtttaagacaatcgcatttcttttggaagaaaacattttggtcaggtaaggaaatttcagagagagtcctttcttaaacttggttggggtcggaaagaccaggttagagagaccttgattctgaggcaacttctaaggcatctcagcatgtgccaatctttggggtatcactttctgagcctcagtagtacactagggtaagtgataatgtttcaatagcttgagtgtattaaatgcaatttcaacttatgatattttcaattgatgatgtgttcattgggatgtaaccccatcataagacaagaaacatctgtattagagaagttctgattccttgcatccttaatgcatttggctatgagaaataaaaatacagtactaagccctccaattgactgaacggaccccctcttggccaaagggaccccagagaaagctcaaaaacagagttcccagccaagatgcaatgggaggtcagaggcacctctttattccctctcccttgctaaccatgactaggctttcttccataagggctaaatagaaaccagcccttttaaaagcctctgccacagctatcaaccaataggctggtgctgcccctcttttatggtttcaagactatgaaattgaccagcattccttcctgataagagaccaccagtcacagagtggttctggccaatctgcatgggctcttgaaggggtatgaagctcaactgcacatgggacatttctccttacataaatattcatgactcctcctatagcttattgtattagtccgttctcacactataaataaatacctgaaactgggttgtttatacaggaagaggtttaattggctcatggttcttcaggctgtacaggaaacatggctgggaaggcctcaggaaacctacaataggcagaaggtgaaggggatgcaggtgtcttaaatggccagagcaggaggaagagagagaagggggaggtactacgcacttttaaagaaccagatttcatgagaactcactcactatcatgagaatagcaaggggggcatctgtctccgtgatccagtcacctcggaccagcaggcccttcctccaacattggggattacaattcgacacgagatttgggaggggacacatatccaaaccatatcacttattaaatatatatattaagccattccactcagcataaatctctattccctttgtccctccctcaaagtctgtttccagtatcttgttggaagctgtgcttcccagcctgtcagaatggccactctgcgagctgcaaccctttatgagaaatacagctctcctttccaactttaggaacctcatcattcttcagatgacaaagttataacttgatgaacatggtgattgaaagtacagggtgctaagacattatacatgagggggaacataacctgcagcatcaagtgagatttcactgaagaagacttctttagtttttaatgtgtgcatgattttctttagtttggaattttgaatattgttgtggattaagttgtatcttcctccaaaaagcatgtgggagtcctaaccctaagtacctcagaaggtaactttgtttaggtctttacagaggtaatcaaattaaagtgaggtcattagactaacctgtaatccagtacaactggtagttaggatacaagtcttcatagaggaaagatgacaagaggacacaaggagaaggccatgtacaagccaagggatgtcttaggctaccagaagctatgagaggggcttgcaacagactattcttccacatagcttccagatggacccaacactgccagaatctgaattttgaacttctagccttcagaactgcaagataataaatgtctagtttttcggccaggcgcagtggctcatgcctataatcccagcactttgggaggccaaggtgggcagatcacctgaggtcaggagtttgagaccaatctggccaacatggtgaaagcccatctctactaataatacaaaaattaactggacatggtggcaggtgcctgtaatcccagctactcaggacgctgaggcaagaagaattgatcgaacctgggaagtggaggttgcagtgagtggagattgcaccattgctctccagactgggcaataggttgagactctgtctcaaagaaaaaaaaagataataaatttttactttttaagtcaccctttttgtggtatcttgttatggcatcactaggaaactattgcaaatatctcaatttcttcaaatcacattgctttaactaaaatcctcaattcttaccctcactgtgtttgaaaagttcttaagcaaaggatactatatttctgttatataatttgatgttattcctgttgccttttaatttttttctatttattttgaaataatttcagacttacaaagcaactgcagacttctagacagaagaattagatacacttttcactcttcttgtcattaagtacaactaaaaactttgggcattatatgtgaaatgtacacaagaaaactctgcaaggtggagaaagaaacataaaggttaggaattttggggccaagaaatgacatggtggtgagttccttggattatctgagcaagtcaataaaggaaagatagtcttctcaataagcaatgctggaataattggacatccatatgcaaacaaaattaatctagacactaattttacacctttcacaaaagttaatttaaaaattgataatattatgtcttaaacataaagacaaaaccatcaaacttctagaagaaaacatgagtaaaaaagtatgtgacttgggtttagtgatgaattttagatacaactccaaaagcacaatttgttttccatttgcttggtagatcgtcctccatccctttattttgagcctatgtgtgtctctgcctgtgagatgggtctcctgaatacagcacactgatggatcttgattcttaattgaatttgccagtctgtgtcttttaattggagcatttagcccatttacatttaaggttgatattgttatgtgtgaatttgatcctgtcattattatgttagctggttattttgctcgttagttgatgcagcttcttcctagcatcaatggtctttacaatttggcatgtttttgcagtggctggtactggtttttcctttctgtgtttagtgcttcccttgggagctctggtaaggcaggcctggtggtgacaaaatctctcagcatttgcttgtctgtaaagaactttatttctcctttgcttatgaagcttagtttggctggatatagattctgggttgaaaattcttttctttaagaatgttgaatattggcccccactctcttctggcttgtagagtttctgccgagagatctgcttttagtctgttgggcttccctttgtgggtaacccgacctttttctctggcagcccttaacattttttccttcatttcaactttggtgaatctgacaattacgtgtcttggagttgctcttctggagaagtatctttgtggcgttatctgtatttcctggatttgaatgttggcctgccttgctaggttggggaagttctcctggataatatcctgaagagtgttgtccaactgggttccattctccccatctctctgataaaacagcctttaaaccaacaaagatcaaaagagacaaagaaggccactacataatggtaaatggatcaattcaacaagaagagctaactatcccaaatatgtatgcacccaatacaggagcacccagattcataaagcaagtccttagacacctacaaagagactgagactcccacacaataataatgggagactttaacactccactgtcaacattagacagatcaatgagaaagaaagttaacaaggatatcaaggaattgaactcagctctgcaccaagcagacctaatagacaccgatggaactctccaccccaaatcaacagaatatacattcttctcagcaccacatcacacttattccaaaattgacgacatagttggaagtaaagcactcctcagcaaatgtaaaagaaattataacaaactgtctctcagaccacagtgcaatcaaactagaactcaggattaagaaactcactcaaaaccactcaactacatggaaactgaacaacctgctcctgaatgactactgggtacataaccaaatgaaggcaaaaataaagatgttctttgaaaccaacgagaacaaagacacaacataccagaacctctgggacacatttaaagcagtgtgtagagggaaatttatagcactaaatgcccataagagaaagcaggaaagatctaaaattgactccctaacatcacaatgaaaagaactagaaaagcaagagcaaacacattcaaaagctagcagaaggcaagaaataactaagagcagaactgaaggagatagagacataaaaaacccttcaaaaaaaatcgatgaatccaggagctggttttttgaaaagatcaacaaaattgatagatggctaacaagactaataaagaagaaaagaaagaagaatcaactagatgcaataaaaaatgataaaggggatatcaccaccgatcccacagaaatacaaactactatcagagaatagtataaacacctctatgcaaataaactagaaaatctagaagaaatggataaattcctggacacataaaccctccaaaagctaaaccaggaagaagttgaatccctgaatagaccaataacaggctctgaaattgaggcaataattaatagcctaccaaccaaaaaaagtccaggaccagacggattcacagccaaattctaccagagttacagagaagagctggtaccattccttctgaaactattccaatcaatagaaaaagagggaatcctccctaactcattttatgaggccagcatcatcctcataccaaagccaggcagagacacaacaaaaaaaaagagagttttagaacaatatccctgatgaacatcgatgcaaaaatcctcaataaaatactggcaaaccgaatccagcagcacatcaaaaagcttatccaccatgatcaagttggcttcatccctgggatgcaaagctgtttcaacatatgcaaatcaataaacataatctatcatataaacagaaccaacaacaaaaaccacatgattatctcaatagatgcagaaaaggccttcaacaaaattcaacaacccttcatgttaaaaactctcaataaactaggtattgatgggacgtatctcaaaataataagagctatttgtgacaaacccacagccaatatcatactgaatgggcaaaaactggaagtattccctttgaaaactggcacaagacagggatgccctctctcaccactcctattcaatatagtgttggaagttctggccagggcaatcaggcaggagaaggaaataaagggtattcaattaggaaagaagaaatcaaattgtccctgtttgcagatgacatgattgcatatttagaaaaccccatcatcccagcccaaaatctccttaagctgataagcaacctcagcagagttgcaggatacaaaatcaatgtgcaaaaatcacaagcattcctatacaccaatagcagacaaacagagagccaaatcatgagtgaactcccattcacaattgcttcaaagagaataaaatacctaggaatccaacttacaagggatgtgaaggacctcttcaaggagaactacaaaccactgctcaatgaaataaaagaggacacaaacaaatggaagaacattccatgctcatggataggaagaatcaatatcgtgaaaatggccatactgcccaaggtaatttatagattcaacgccatccccatcaagctaccaatgactttcttcacagaactggaaaaaactactttaaagttcatgtggaaccaaaaaagagcccacatttccaagacaatcctaagccaaaagagcaaagctggaggcatcatactacctgacttcaaactatactacaaggctacagtaaccaaaacagcatggtactggtaccaaaacagagatatagaccaatggaacagaacagagccctcagaaataatacatctacaaccatctgatctttgacaaacctgacaaaagcaagaaatggggaaaggattccctatttaataaatggtgctgggaaaactggctagccatatgtagaaagctgaaactggatcccttccttacgccttatacaaaaatcaatttaagatggattaaagacttaaacattagacctaaaaccataaaaaccctagaagaaaacctaggcattaccattcaggacataggcatgggcaaggacttcatgtctaaaacaccaaaagcaaaggcaacaaaagccaaaattgacaaatgggatctaattaaactaaagagcttctgcacagcaaaagaaactaccatcagagtgaacaggcaacctacagaatgggagaaaatttttacaatctacccatctgacaaagggctgatatccagaatctacaaataacttaaacaaatttacaagaaaaaatgaatcaaccccatcaaaaagtgggcaaaggatgtgaaagacacttctcacaagaagacatttatgcagccaacagacacatgaaagaatgctcatcatcactggccatcagagaaatgcaaatcaaaaccacaatgagatagcatctcacaccagttagaatggcgatcattaaaaagtcaggaaacgacaggtgctggagaggatgtggagaaatgggaatgcttttacaccattagtgggactgtaaactagttcaaccattgtggaagacaatgtggcgattcctcaaggatctagaactagaaataccatttgacccagacatcccattactgggtatatacccaaaggatgataaatcatgctgctataaagagacatgcacatgtatgtttactgcagcactattcacaatagcaaagacttggaaccaacccaaatgtccatcaatgatagactggattaagaaaatgtggcacatacacaccatggaatactatgcagccataaaaaaggatgagttcacgtcctttgtagggacatggatgaagctggaaaccatcattctgagcaaactatcgcacagacagaaaaccaaacactgcatgttctcactcataggtgggaattgaacaatgagaacacttggacacacggtggggaacatcacacaccgtggcctgttgtggggtgggtggagtggggagggatagcattaggagatatacctaatgtaaatgacgagttaatgggttcagtacaccaacatggcacatgtacacatatgtaacaaacctgcacgttgtgcacacgtactctagaacttaaagtatatatatataaaaaagcagaatttgtgaaagaaaaatattgatgaatggactctattaatacaaaagccctcctctgtgaaagtcactcttaaaagaatgaaaagctaagccatggactgggtgggagaaaataatcacaaaacagatatttcataaaagatgtgtatctaaaatacaaaaagaactcttaaacttcaacaataagaaaaatccccaacaatttaaaaatgagcaaaagatctgaacagacacctcaccaaaaaagacacatggcaaatatacatataaaaagatacctaataacaattgtcatttgcaagttaaaacaacaatgtcataccatcacatgcagtagaatggttaaaatccagaaaaacaattcacatctaaagccattattgttatagttggattggtactggtatgattgtaactgttttgttacacttgttctttcttttttaccctcttttttttttttttttttttgccttctctggttttaaatgatattttgcatgattccatcttattttttctgagtatctccactgttcttctatctaaatttttagtggttaccctagaatttgaaagaaacatttaaatctaatctaagtgccccctcaaaacaacaccacttgtgtattacagatgccttacaacgaagcatttccaatccctccctcccattccttaggggtgaccgacatttcatattactacttcatatactataatcatccagtacattattactattattattttaaaagcaagttacctttaaattatgaataagcacatacaatattttatcttaatttattccttctttgatgctcttttttttcttaatgtaggtctgagtttctggcctatattacttctttctggagaactacttttcacatttcttccaggacaattttgctggtgataaaatcccttcatccttttgtttatttgaaaatctttcttcttcacttttgaaggataatttcactggatctagaagtgagttttttgttcaatactttgaatatggcctctgatgagaaatctgataatttccacattttatcctcatataacgtcagagtttattttttggcttctttcaagattgtctctttgtatctggtattctgcaattttaatacttacatttaatgtaaggtgtacttacatttttgaaatttgttttgttggtgtttactaaatttgttcaatccatggtttgttgcctatcattaatcttggaaagttctcagccattattactttaaatatttcttctcctccattttttcttttgaaattattcgagttttttttttaaattttctgttctgtttctttttatttttttgtcttttgtactttagtttgggaggtttctgttgagctgttttcagcctcacaaattctttcctgtttgtaccaagtctgcttatgagatcgtcaaaggaattcttcatttctgttacaacattttttatttctagcatttttgtttttcccttagaatttccatctttctgtttacatcatccatctgtccttgcatgttgaacacttgctctcattacagctcttcatatattaatcctatttttttaattctctgataattccaacatctgtggcatatttgaatctccatctaacgcttgttttggcttacttggttctgaaggctttttttggttttgcctttttgcataccttttaatttttttgtgtgtgtggaaagtcagatatcctgtatttggtaaaagaaactgtagtaaataggcccatggtataaagttttatgttatctttcctaccagttgggctgtgttaaatttttgctacatctaaatatgtcagaggccttaaattcccatagtttccttttttcctttttcttttcctcctttcttgagtttgggggatccctaaatacttctgcttagaaagagtctgcctcttgcagctcttttagtattataccattcttattacatggagtcctcttgatgtatctctaacgtctacgagaagagaaggggtcaataaccttacaattaaacccgtcttttagtggccagtgtctctgggatgcgacctctacaggtgcctcttcaggtttctattcccttagatgagacccaaaggttgggactggaaggggcacagctaagtggaaaaatcctcttctcccaggtgagagagttaaagcctttcctcctgttaaagaggaggctctaggtgtatttccgtatgattaaccttcttcccctgccagagccacaggggatctttttcagctcttcatcatgaaaacctgtgagggttactgagccagcatccacaaaattataggctcctgccccgctcccccgtcaagactgtggtgtatagaatttttcattttcagagtagcccacactcagctacccaagattcatcaaaatggctatttaagtgtttctatcagtttatggctgcagtggcttctgctgtaagtaagcagatcacagctgcgactgtctgggttcatctgtatctctaaattttgtggttgtggtttgccctcagaactcggttctttggttcaatgaaggttgttcatttacagtttgttcagctttttcttgttgtaagtgtggaagtgatatgttccaagatctttaaagatctgaggcaagactagaagtccttacccaactaatttaaccaacgtgaacaaggaatttctcaaaggttgccttctcaacaaatggtgctacaacaattggacatccatatgcaataaaataaatactgacccaagcctcatatttatacagaaatggactccgaacagatcatgtgaaatgtaacactgtaaaactgttggaaaaatataggagaaaatctttaggatctaggtctcagcaaaaagttcttagacttaacactgaaaaggcaatccagaaaaataaagttgataaattgagcctcatcaaaattagaaatatttctcatcaaaattacctgttaattttagggatagcatttcagaaagagggaaactgccttgtgtgaaatgataagcaggagaaaatatttgcaaaccatatattcagcaaaagagtagtattaagaatctataaaaacactcaaaacttagtaaaaaaaaaaagtacaccatccaattagatcacatgcaaaagacatgaagagacatttcaatgaagaagatatacagatggcaaataagcatatgaaaacatgttcagcattactcttcagggaaatgcgagttaaaaccacaatgagattccacacacacaacattgtggcaatagcaaatcctggcaaggagagggagaatctggatcacttgtacattgctgagggaaatataaaatggcatagccactctagaaaacagcttggccactaaaaaagcaaaacaaaacaaaacaaacaaaaaaaacttgcagccaggcatggtggctcacacctgtaatcccagcactttggggggccgaggagagaggatcacttgagcccaagagtttgagagcagcctagccaacacagcgagacttcatctctacaaataacaaacttaaccaggtgtggtggtgcatgcctgtggtcccagctacttgggaggctgaggccagagtttcacttgaacctaagaagttaaggtcgcagtgagctgtgacggtgccactgcactccagcctgggcaatagagcaagaccctgtctcaaatacaaaaacagaaaataacagcaatttgcaactatcatatgacccagttattacacacccaggtatttatcccagataaatgaagacctatttctaccccaaaacctgtacgtttatgttcatggcagcttattcataacagctccaaactggaagtacccaaatattcttcaaggaatggtcaaggaaactctcattaatccattcatctttactatggaatactattcagcaataaaaggaaacaaattcttgataccaactacagcctggatgaaccactggagaactatgctaagtgaaaaaagctcttacacaccgtatgacttcatttatgtaagattcttgaaatgagcacagtagatgtggagaacagattagtgactgatggggttaaagaggaactatgaatgaagaggggtgtggctatgcaggggcactgagggatccctgtgttgatggaagtatgcagtctctagactatcaacgccaatatcctggttgtgatactgtactatagttttgcaagatactactattgtggaaaactgggtaaagtgtgcaagagatatctctgtatttcttgcaattacgtgtgaatctacaattatcttgaaataaaattttactttaaaaaagctgcagtcctcaaattttgtgtctgattgtgatagctgatattgaatagaggaacacagggtacaaatggagagtgaattttcaaaactctggaataaccttataaacagtgaagaccctgttttactccgaagatgaacccagtgtttgagtttacatgggacattttgggaaatattccctactactcttatctggttgattacacttgtaaaaggctaaaggttaaaacattaaaaacaagccagtgatggccaggcgcagtggttcacgcctgtaatcccagcactttgggaggctgaggtgggcggatcacaaagtcaagagacagagaccagcctggccaacatgataaaatcccgtctctactaaaaatacaaacattagcttggcgtggtggcgcatgcctgtagtcctagctactcgggaggctgaggcaggagaatcacttgaacctgggaggcggaggttgcagtgagctgagatcacggcacctgcacttcagcctagcaacagagtgagactccgtctcaaaaaagaaaaaagagaaaaaaagaaaaaagaaaaaaagaatccagtgacaaatgaaaaaaaaaagctgcaaacacagaacaaaaatttcccatatgccctttacctagattccctaaatattaacattttataacccttcttgctttataatctgtccccatccccatagcatgtatgtgtgtgtacacacacatacttatttattctattttattttttcaaatgtctgagggtaaattacaaatatgataccacttcacttatcaatattttggtattttttctataaaacaaggatattctcttatataactagagtatacattatggaatcaggaaattaataatagcaatgctgctgtctaatcaacagaccttttcagattctttcagttttttcattaatgtcctttcttggtccaggattcaatctagaattctgccctgcatgtctttgtcctgtctttttcatcccctttaatctggaagagttcttcaatctttctttgcctttcatgactttgctgtttttagagagtaccgggtgtagaacgtcccctcgtttgggtttgatgtgcatttgtggcaaggaccgtgcagaggccatgctgtgtccctctcagtgcatgctctcaggaagcttgagcaattgattaaagaggagtggccaggcacggtggctcacgcccaaaatcccagcactttgggaggctgaggcgggcagatctcctgaggtcaggagtttgagaccagcctggccaacatggtgaaatcctgtctctactaaaaatacaaaaattagctgagcgtggtggcaggtacctgtaatcccagctactcggaagctgaggtaggagaatcacttgaacctgggaggcggaggttgcagtgagccgagatcgcgccattgcactccggcctgggcgacaagagcgaggctttgtctcaaaatagataaataaatagataaataaataaataaataaataaacaaaaagggtgggggtggtggggaatgccagccactgtagagtttctattttttccaattttaataagtaggtattttgtgggcaggtattttgagaccacatatgtatccagaatgtcacatttgaaaggtgagcagtgattggttagttatgagaatattgttctgagggcaaagatggcatttcagaaggaaggaaactgtaggaagtccctaagactgagaatctagaatttgaaaggagggaaatatctcagtctcacatgccactggaggagagagagaagacaagctgagctggagggctcggcaggcttttaggatgtactaaaaactgagggctatcccagttaggcttaccaaacttaacctgcctcacttgtttttcacttacttgcttttagttgattttaagacccatatagctaaaagtcatgtagctaaacactatataactaaattcccaccagcttccttatagatgacatctttgatgtatggggcacctcagtaacagttgcctaagttgttttgcaggaatttggtgttagctcttttccagttcaagccagttgagaccagtgacccttcaattgggcctgtgtgagtgtccagtgggtgaccttttgatgtcagagagccaaaaactccacagttagattatgataataacaccattttgtgaacatgcatcctatgaaaagccaggaagtttgactatgcttacacagatcactgagtactttcccttacctccaaccatctctccccatgcctcagaccaccctgttttcagcccataaatattttgaaatcctatattcagggaggcagagttgaggcctgtcttcccggctccttgcttggttgccttgtgagtaaaccctttctctgctgcaaaactcatcttctcagtgattggctcactgcatgatgggcaaaactggcctggttcagtaaaatgctgagtatttttaacattttaaactttaattccaatgcagttggacacccttaaaagtttttaaacagaggagtgataaaatcagatgtgtgttgtagaaagatcattctgattttattagaaatagattagaggtatgacaagggacttatactttatatccaaccattttatctctctgtaacttatttttggcacatggtatgatacagacattcgactcttttagtctgtagatgagaacttttctcagcatcacttaattaaaaaataacctattttgctttgacttacattgcaaaagaacacacaccgattccctcaaaaatagatattaagtgcccactatatctcagggaccattctagaaattggaatagagaagtaaataaaatagacagaagtccttgccattgtgaatgctctgtgacctataatatttatttagaataattatctaattattttagaataattagatataattagaaaattattttagaataattagatactttattagataaattaatttatctaatgaaaattagatattttttccccagggttttacctgtgcatgcgattgtatgtatgtattcatctatatctttttatagtttaaaaataccccataatcccacaatgcagaaaataatatcaaaaactttgatgtatatcattacaaataccagtgcaacttaaatttttcatttgaaatggtgtaatacattttattttatttttgtaaactttttcccctcaatatatcttgaatatcttgccagactcttaactgttattgtacaatataattttgatttgctcactagcattctcttgtattcctataccataaattatttcacttatcccacaatctatctaaaagagagtgattaaattgaagaaagtaaattgttctgcataataaaccgatttttttcccttggtggccctagagtaacagatatggggcaatttattgaaagtcagttcaccgattggtctattcactgaaagtgggggctctatagatgacaatataagaagaaatgagggaaatgacttgatatgaaaggagatttttctagaattagggtggcattgtgacccaagaagagagatgaccactgggggctaacagtgtggatcaccagtagattgtaatagatttggtaactggtatttaatttcaaactgttctgttgcctcaaaaattctccaaagtattgagtgaaaaatgaaatttctgcaaagagatgtgaaccaaaggctcaagttatgtatttttaataaaatgcaaaaggacaaggcaaaaatgttaaataaaacttacactttcactacatttttgaggcataattgtttactctggtataattactagtagaggtattgcaaaatgaaagaaaatgcattctattgtccatatagagacaatgtatcatagtggtcaggagttcgtgtttcaaatcagaaagggctgggttagaattttggttctgccacttgcttgctgggcaatttggtacctgtctctttccaaggatctgttttcttgtacagaagcacgggagtaacatgagaatctagcaggcagggctgtgatgaggaccaaatgatgcctatgatgtattggccacagtgcttggcatatcagctaaaaggtgttgagtttatgtgttaaagatggtggtggtgatgacataacacacactggctgaaagcttttgatacataccacgaagttgacctctgtagagtttgtatcaaattatatttccaccattgcatataagcagtcattctcccacattcacatgggaattacagtgtgtaaatcatgagtaatttgaattaagtgtcaggtgtctattcagtgactttttgttgaacgcatagtctgtgcaggtcatttggtccagcaccaaaagacttagaatgaattagacagattcaggctctgtactcccagagcttatagtctagggaatgttcctctttgctcactgatttacaaagataccaagtttttcttttcttttttgcctttctgtaaaatatttatttcatcaaaagttgatttaaaaataatgaagttttaactaattcaattatactgttaaaataagtttgctcaaacgaattactgtaatctatatgagtttgaactttttttagccaagactttttctggcaacacattgtcctattttttggtaaacatttaattttatttacgcaatttatgttgtagagaattcttagatttcagtagttttctgcctgctgcaatactcagcctctgggagatgtcttgtgatcttgccttactgctcactgaagctgttttctatgaaaggaagctcacatccacctgttagagaatgtccagtttctagcatttttctctttcacaggatgggagattgcaagtgggtcctctatggcttcatctaactgggactttctgacctctgtgtggaagacagttcttaaaaatttaaatgtgatagcacttttctcattttccagaacttccacattccctccctctcttcctccctccctcctttcctccttccctccctccctccctccttccctccttccctccttccctccttccctccttccttccttccttccttgcttccttccttccttccttccttccttccctcccccgcctggctccctcccctcccctcctccgatcctcccttcctctctccttccctccttccttccaaatctactgtaggatagacagataatacaggcatctggtgcaaggaagctaaattcccgtgcttgtatcagtatcttgtctctagaacacaggtgtctcatgtctacaacactaactgagcatatactcttttcaaaggactcatggctattgatttttaaaaagcttacaattactatacacacacacaaatgattaaaatacttgattgcatgtaaaaataagtaaaaacaaagctgagtcacatgttcagaagaggggatgctgatatgttctgatgggataggacagacattggcattgaagatgatctttcactgtgcctatcatctttataggtgaagatgaagaggaaaggcatttaggcagtaaaatgcaaataatatgaaatgcaaagtgaaagcctgcctccctgccctcactctgaatgttattatgctggggttgcctttactattttggtttttagtttttctggtgtttgcctccatcacacgaacttgtatttacttgtacctctatttattgatttatcagcctcaagaatgttactcatagtggaatgacactcattgtggaagataagcaatttgcttcacttacgttctccttcccacatttttattgattatatttcttttaaattatttctttggttactcattcaacattaaataatatactcaagcctctatatccccattcattacttttggaggatatcattaactgcccactctgaggaaattatctctctccagtataaaacaggtgctacaagtctagctcttactcctgtgtaaagccaaccatgggactctgatgtcatggactaagaaagagcagcagagcctcagctcaggctttcttccccacacgctcacttttagttatgaaaatgactgggaagagaacatgtgatttttattggcttctccactggaagataggcagaggaaaggaagttctgggtaggctctggagtggtggataaacaatgaatatgccaccaaagatatatccaagtgtttccatgagtgtgttgtctcagaaagttatttaacgaccacttctcaggcaataaaacttgcactcacaaagatcggaagaaacatggttgtgccctgaatgtgaagctcagactcatttattaagggccatactaaacactgggatccactcatgattatacttttaattagtgcgagtgatatggcttggctgtgtccccacccaaatctcatcctgtagctcccataattcccacgtgttgtgggagccacccagtgggagatgattgaatcatgggggtggtctttctcatgctgttctcatgatagtgaataggactcaccagatctgatggttttaaaaacagaattttctctgcgcaagctctctctttgcctactgccatccatataagatgtgacttgctcctcctggccttccaccatgattatgaggcctctccagccacatggaactgtgactccagttaaacctctttcttttgtaaattccccagtctcgggtatgtctttatcaggagcgtgaaaacagactaataccacgagatcacccataacttctcaaaccgcctgtacccagaaagtattgagtggaaatcagttaagaatttggctctattctaacctaccccctcctcagagatgtcattaactacttccttctctttttactttaatagtatactacgtttcactttcccatattacatatgtcacaagagaatagctgtcagttcttcaaggataggacgtatgtgaaaattcatctttgtatgaacagcatctaatacagatcttggatgtgaatcagattatatttattgcaataaactattgcattgcttttaaattattttgattttatctttcccactgaactgggaacaactttatgattagactcatatattattaatttttgtatcttctccctctatcactgtctgtcacatgagtttccatcacacaagtttgggttagatatttgttgtatattataattaatgaaaggctatgcaaagtaagccccttaactagaaacttctcttttgggatcatatacccagttgaccctttaaagagttaaacattgtagcagaattgtttattatattttggtattatgtatctttttttaaaaagttctgtttctttttaatttttttaaacttttcgtttcaggggtaaatgtgcaggatcttatacaggtaaacttgtatcatgggggttagattatttcaacacccaggtactaagcatagtactcgatagctattttattctgctcctttcccttctcccactctccacccttgagacagccccagtgtctcttgttccctctttgtgtccagttttttttttttttttttttattcccatgtaacacctgctctactagccaatttctggtccctcagaatctattgttgatctagttctctatgttaaggcatgttcttcatttctttaaaatgaacacacacacacacacacacatacgtacacactcacgtatgccaagcagtgtcaatgcattaattataaccaactaatttcacatacatgtgaatcagctttgcagatgcctgtgtttcacttgtttcaggcaggatggggagaagcaggaaaacaattccaaagtgcttcttatggatgtaactttaggatgagggaccacgtgcagcaaaatgacagtgtggacctagcagaagaagaggtgatgttaaaaagggagggacatgttcttttttttaaattgaaaattggtgtctgtagttgatatatattcatgtaggtttatacagaacatttatgagacgtatgataattctcaggtgagtgagattttcagactggcattttattaacttatgttaagagcacgccagacactgctcttggtttttcacaaatgatcccattgtatacctacaatacccctaggaggaatatcttttcttgtgctcattgctgatgggaagacagaagcgcagggaggaaaaaggttttgctagtgtcacacagctagtgggtagtgacgctggatttgaatccagccagtctggctccagtgcccaagctctcatagccattactctatgaggtcatatgtaccagatggatgaaacagtcagggcttaggttagggagcctctgataaaaaagtgcttctagccaagtttatcatatgtgcaatgtggactctctttattttattgtatatttttaaaattaaaatgaacaggaaaattatctaaattttttaatcaactacctgagacaatatcttttagcttgcttttgatggcaaatatgaaagtatccattccaatttgttctaagctgaaaaagaaagaaattgactggatcacacaattgaatagaacgggacagatctagcttcaggtaaggctggaagcaggggctcaaagtgtcaagaggtgcttgctttactttcttcattgctcaactctgtatcttctctgttaactccttcccaggcaagctttcctttgttgtcgttgttttgtttgtttgtttgtttgtttttgagacggcgtctccctctgtcgcccaggctggagtgcagtggcatgatctcggctcactgcaagctccgcctcccgggttcacgccattctcctgccttagcctcccaagtagctgggactacaggcgcccaccaccacacctggttaattttttgtattttcagtagagacggggtttcaccgtgttagccaggatggtcttgatctcctgaccttgtgatccgcctgcctcagcctcccaaagtgctgggattacaagcatgagccaccgcgccaggccaactagctttccttttctatgtgcaccatggctgtcagaacagtctagggctaaatccttctaagatcgaattcggtggagaagagcgaagatctttttttccaatatttctctaaaaaaaacccccagtgtccactttgattggtccagataggtaacacgccccttcctgaacgttctcagggcaagttgttggattgattggtttagtcctagggttgagaatggagctctcctctatgatgcacagtgaaaatgatcaatggagatgcccttttccatgcatggctggaaaaagaagtgaatgctgcagaaacaagctgcagatattcattgcaaagtttgaatttaatttttgtgggagaatactccagctgccttttaaactattccatcttgcttgatcagtagaacttcataaggaaatgtcctcattctagtgagcaatatttagtcctgcaagactaagaaaccactggattgatttgaggacaggttggagagacaaatgaatgcagttctttggtgtaacacctgtagattgtttttcttatcctcttacagcagataatactttaatagaactgagattgtgactgagacaggcaatgctacatcaattaagatcaccaatgcattgtggaggacagacacaatgcaccttggcagaacagatgaatcaatttttcacctcggtgggccagagcagtaaaaagaaatatttctgatgtatatgaaactcatgactaacatatgttcatttggatgataccctcttcctactcccatttataatcattatattttagtgtttctgacttcagtggttcgcatatttttgttcttcaaaattcatttaggtgtatctgtttattcaaatgcaaatcattataggatagaatgatattggtaggattcatcttcctccttcgcatcagtgttagtcctgaattagagctggtggtagtgggtggagaaaggagaggacggtctccttaaggaagtacaatcatttgtcaggagtaaaggtgaccatctttcatcggaggcacccagggactttaggagcacatattttgtgacttgttttgaagaatgtgtcagatgacatgaacagggctagaattgggaagaagcccaagtctttccctttcaaaagaaaaggaaggaaaaaaagagaggaaagatgggtgttacttttatagcaaagcacaatctcaaaacacaacctgagacatttcttgcttgcatcatagcctgataatacagggcacctactgttagtagataggcccattctcagggggaaaaaaaagtgcaggaaaatcaaatctttgccaagaagccaagttagcagtgggcaggaagagaggggagggggccgtggtgtgtttggtaagagttggctctagtatctaactgcttctgtctgaatcactcatgatctggggaatattggacaagttacttgctctctctggagactcatagctctatctgtaaaatgggtatatgcttttgtagtggaagttcaatggagtaatgtgtaagtaaagctttttgctcaatgcctaaaacatagttgatttttcttaagtgttttatattacttatttactggacatgaatattccatgccaaatattgtgctaagaaccttactggcattatttcattaaaatatatccatgtggtaggtattataaatctcccaatttttcagataagtgaccacaggagaaaatcattttctaaagtcatgcactttgtgagttatagagtagatggaattaaactcgagtttctctgattacagatcttctgaaatttttaacattaaaaaaaaaagagcttggaaatcctgactgttgtaggctgtgccatgatcactgttgaattctttatctgaacaccagttttctatatgaactgagagagatggcaagaaataaagaattggtactttcttaggctgtataaatgagaggattgtgcaaatcatgatagacaaaacccaggaatgactggcattttaaagaaacttgtgcttactagaaagggtaattaatagcttaatgaagttactaagtactaaatgctcataatcattctgtgtttaatgctttatatagggaaaaaacaataagaccagcctaattgaacagagtaagatacagctcagctcttgtcaaatccccctcccaaactctacggctaaaaaaatgtgttatcttaaggtgggaactagattgagatgccaaaagcacaatatgtaaggaatgctggctttcaagattgtgaaagtactggaatgtgtgttcattttctgttacagtataacaagctacagcaagctgagtggtttaaaatcatacatataagcttggcatggtaatcctagcactctgggaggctgagggtggtggatcacttgaggtcaggagtttgagaccagcataacaagctacagcaagctgggtggtttaaaatcatacatataggctgggcatggtggctcacatctgtaatcccagcactttgggaggctggggctagtggatcacttgaggtcaggagtttgagaccaacctggccaccatggtgaaaccctgtctctaccaaaaatacaaaaattagccaggcatggtggtgtgtgcctctagtctcagctactcgggaggctgaggcaagagagttgcttgagcctgggaggcggaggttgcagtgagctgagagtgtaccattgcactctggtttgggtaacaggaagagacttcatcccctctgccccaaataatgataataataataaaataaaaatcatacatatttatcaccctgtagtttccacgggtcagcagttctagcacaacttaattggatcctcggtaaggctgcagtagaggtgtctgtggagctgtggactcatctggaatctcaactatggaagggtccacttctaatttcacacagttggcagaattcatttccttgcatatacggtactgagagtttcagtttcttgttggttgtcatctggaggtcactgtgagcgccttgaggcctctcatagtttcttgtcatatgggattctgtgccatggctatgtgctttctcaaggtcagaatgagaatgaaggaatccagcaaaatgggtgctgccatcttatgtaacataatctcggccgggcgcggtgcctcacgcctgtaattccaacattttgggaggccaaggcaggtggatcacttgaggtcaggagttcgagactggcctggccaacttggtgaaaccctgtctctactaaaaatacaaaagttagctgggcatggtggtacatgccggtaatcccagctacttgggagtctaaggcaagagaattgcttgaacctggaaggcggaggttgcagtgagccaagatggcaccattgcattccagcctgggcgacagagagagactctgtctcaaaacaaaagaacaaaaatataatctaatcatcaagttcattgagattattgtgttcctttagtttttttaggtgaaaaaatgattttagtgaataacaagccaatgggacctacaggctagaaatagtcaaaagtgagcaggagggaaagaatgtaaatcaatgagtatttcatgtactggagttctcacaatgatgcgatgagatatcgggggtgtctttagaagtctctgactataagccacaccagacccaatttacaatgaataaagaaatttattttttcaaacaatccgaagttgcagcagcaccaagcttgtctggctcagaggctcagtggtggctctcaggaagccagctcctttctgactttctgctgtgtcatccttggcatgccgtctcacttccctcatggtcacacaatggctgtcgtagctcttgaacaaacatcattgttcagaagcagaaggaagggcctgcttctcccttgcatctctctttctcttttttaagagctaagaaacatttccaagaagctctgacagtgtactttcactgtatctcatttaatagagttgagtcatagacgacttctcaagccaatcaaggaagggggatgaaattagcaggattggttcaaatgaaccaatgcttatccttgaagttctggctggggtcactttcttagaacacaaaagatgaagataaacaaaatcagagccctggtggcaggaaagtctgtgtgagcacattcgtatgtgtggatctgcatgtaggtgtgtgcgtatgtgtatgtgagtatgtatgcaggtatgtgtagaagggaagggtttgagttaggaaacaactgtattgcatctatacattttaaatgtgaaaggatctcctctccccaaaaggtttgcagagtcagaaacttaggttaaatgacttaggcacagactagctaactgtgattaatgccttaacttgctctaatgttgccatgaaacttgcaaaatgaggctattaatattacccactgtctcagatttgtgtgtgatttaaatgtaaagtgtttgtccccgtgtctgtcacttattaagcgtccaataaatgaggctatatgaagatggggagatgagaattatccttattatattctatcttgagttttataatactaatgcacacctatagtgtactttcaactttgcttcaatggatgaagtttcaatggaattaagattctttggcaactttctcagagtcacccaataagcaggaactctcttttaatgcaaaaagcacatctgcagagttaacttcttggacatggtggcatttcttccccattgaaggcctttcatagaacttttccaaatctccagtataagttcaacacaaatactcttgcaccaatatcaggatcgttttttacttttatatatactatttctcccttgacagtctcatctcccagaatcgagtgctaagggcgattgtttgtttatgacacctctacatcttcctttctctcgcacttcttgcccctgaaaggtcataaaatatttgactgtggtgggtggttaaagtgctttaaaaagtagttcatgaagtttaattaaaggcattgggaaacttttatctgcttgatatttggggtaatggagagattatatatgaatgactgctgagcattaaaaaatatatagtgaggaaaaaaagaaaaaagctctgtcagccataaagcaagcagtcagcagggacttgcatgagatgctaaaaataatgtcccattagtgaaccaacactttcagaaagtcaaaatgggatgggggcacttaagggagggcagttatgactgaagggaagctgagattggataaggaggccagcagaaatctatacaaaagagccatgctttttggtcagaactttctcagtgtacgtgacaaaaacccaactcaaagagaactgagcaaagaaatgtattggctcttatctagatgattgggtccagggatctaaatgagcgtgctgtctggtccctgtctttcctcaagttagtagttgactccctactccttcatctgattccttcagcagcctgacggtaaaaaaagtgaggtttttttttccccctcaattaatgtatttaatgtttgccaattacaacagcttaaaatcagcatatatctagcaataaatctaataaaacatgtaagacctcttcatggaaaatggcatattattattgaaagagattaaaatctaaataaatcgagggctagaccacattcatggattggaagacttaagacttgcagagatgtcaattctctccaaagtaatcttcagattcagtgcaattcttttcaaagtactagcattatttatttacttactttagaaactgacaggctaatttccgaaatgcatggaaatacgaaggggcaagaagagtaaagacaatcttgaagaagaaaaagctggaaaatgtacatcagaagattcaagacttactattaatctatagtactaggatagtgtgcaattcttttatgttgagttttacttgtttgtatggttctaaaggctggacccccctagacagagagtgtggaaagcatttgaggtcccagtgcacatccaccagtgtgggttgtgggtgtcatctttgtatgtgaagaattggatatggacctattctttctggtaagcccgagagctgctttgttctgtaaaccagatgttttgtcttgctggtcagttatagcaggaggccatctgatagtctagctggcagtgacatggaaatggcactgtacccaatgagaaactttatagttgccatacagtattgaccctagaggctgcatttgctctcaattttgtgtgttggcattgcgtaaactaggcaatgtatttatgcttaccaatttccttattcaaatagcttttcattataacaaaataatcttaggtactgaaaatttagaaaatgcagatagggaaaaaggacataaaaagcagttaatcccaacactcagaaatcagagctgacttgtccaatacgcatagaaaacacagtgcctaaggcttatagaatattttttttccttttaaaaaaacttttactttaggttcaggggtacatgtgcagatttgttattataggtaagcttctgtcatgggggtttggtgtacagaccatttcatcacccaggtactaagcatagtatccaataattattttttctgattcttgagagagagattctttatcgtagttcaggctgctataatagaataccatagaatgggtgacttcaacgacatatgtgtatttctcagagttctggaaactgggaagtctaagatcaaggtactggttggtttggttcctggtgagggtcttcctcctggttggcagatgatttgttgctatatcttctcacggaagacagagaaaaagctctggtctcttcttctagttaagggcgcttatcccaccatggggctctacccttaaaacctcgtggaaacgtaagggcccacctccaaatgtcatcgcactggagattaggaattcaacatatacattttggatgagtacagacatgtagttcataacactgtcttactcagaaagttccataaccatctagggactgggtctctggctgtgaggctatggccaggtgagggagaggagagaagaggaagtagaagacgataggctctcaagtctttagccaggtttgggactaaggtctgagccttgtggaatgacagagctaaaacttaaggttgccagggctgctttctctgggagcctggctgatgcttggcatagacagtagttctcaggccctggtgacagaggaattcatagacttgtgatgagaaggttctctcatttctcatttctgtgaagagtccagtgagactctgccccagggatgactgtaggaagccagcctggtttacccctttgggtgctctgcagctgtgcagctccaggagatgccacagtgagcacaaaatagcattctcagggaggaagttctccttcaagtgactatgggttagagactgcatgagttttctgtgttgcataagtcgccatgcccttagaagtttaacaaaacactcatttactagctcacacttctgcaggtgagaagtccaggagggtatagaggagcaataacctccacaggtgcttagtgggaatggacccctgtaacaaaagatagattagcaagagaaaaacaaacagaagtttatgaacatgtctatttcacatacatgtgggagacatccagggaatgagtagttctccaagaggtggcctttaattttaatttattcagcatcttcaatgaaaagatagtaactttttagagaattaacaagtcaaaataattttgagtctctagtggtagcaacttggaggaaggcagataaatggcagataaaggcaagttagtaaagtttgtaaatctctgaaaaatatccagaccaaaaagggtccaaagttattctcttcttgttgctttgtccctctttgagacccctactgcctccatctgtaaaaactctgtttctaaggcttacctgattaagtcaggcccaccgggatcacctcccagtgttgaagtcaaccgtgccatatgtataatgtaacctgatcacagagaaagacactatatacagccaagagatcatgcaggtcttgcagcccagggaattgagaaatcttagtggatattttagaactctgtcaacctctgtgatactgacaaagagactggtatagaagaaccttagaggacaaactccaagcttagttgaaacacttctaagggctccccagtatttgtgaacacttgagaaacggcagaggtggaagtccaccaaggtccttattctactttaatgtgggtagccaatgttagtgacaagtggcatagcattgttccagttgttctggaaaccagagattctggaaacagattgcttaagttcaaaacccagttctatcattaactagcctgttaaattgggtcagttactaacttttgtgcctcatgtaaagattccccaagatcagatatttgaaaggactcacaggtcatatttctgtaaagcttttacttataggaaaatgatatagtgcagcaagaggagtgcaggcaagcactgaggtccaagagacatccaggaacaagctcccactgccgtctcctcaggttaaatcaccaagccttgtgtgtagaatcttggctttgggagagctcaaaacagaagtttccactagggttttaagctaagccagcttaactcatttggccagctgcaaagcaccagggaaaaactgcttttagaaattgcaactcaagtttgattttaaataaaacatcacaaagcccactgcccctatcttggccaagactcaaagccagatgtccacgtacctgagagaaaaaggttaaaacttttgtcatccagccataaatcaattatatctttcatagatcagttttctcactggtaaaatgtggataacagcaatacctatctcataggattaaacatttgtaaaatatctagatgaatgtgtagcacacagaaatcactatagagtttacatgtttttagaatatatatgtgatcttactgatttctacatgtcagcgaagcctggaaaattcatgttctatggacaaacagatttttctccttttgcaagccattttctgagggtatacaaacttatattcctgctggtctactctataatttggaggaaaagagtcaaattcacataggatagagtggacttaaaggaatgtcaattaaatgacatctcttatgaaaagttcctaggaagcacaaaattcagtaagtcaaaagcaaagatttcatcccatgagtccaggtttatacattttctttgacatgcaatgatttttaagtagttttattcttcatgtgttttcaaacacattgtatgtgtttatgtctgaggaatatactctctcctgttatttccagaatcttaactatgtgagcaaaggtccacaagcttccctgaccccttctccattatattgctaatccgtcactttattctgcactgttcataaatgtaattctgggtggaatattttgccaacacttgtataagagggagtacttgaagtttagttacattgtcaacaggaatatatttaggttttaactaattattttaagcttagctttcattagtttatagcccttcaattgggcgctgaaatgatgaatcaattacagaagcatagaacgaaggaggtggagagaggaggagtctatataaaagaaaacgagatgggtgtttgtcagcatttctgaaggtgtgaaaggtttttgatatgcacactacggaaatgtgcaaactggcagggcttccacccactctttcatgtgaaatgagattgaaaggagacttattaattattgccagtcatttaaaaagtcctcttgagcagccattgataattagggatttaccattttttaaggaaggcatactgaatgctgaattagcagaatcaggactatgggtgatcaatgttgtctctgtcattcattgtttttccaaattactttttctgtattaatctttgcgataattatttttcctttttaattgtgtgggttcatagtagctatatatatttatggggtacatgaggtgttttgatacgggcaggcaatgcataataatgtcatcatgtaaaagggggtatccatcccctcaggcatttatcctttgtattgcaaacaatccaattatactcttttcgttgctttagaatatgcaattgaatttctttttgcttttaagacatgtccaaccattttgaagctgggattataacatgattaataaaataataagttagaacattctgtcatgttaagacacgtgagctggttgtcacagagctgttaagaacaagggaggcagaattgggaacagaagactctatattctattggatattgtgagaaactcaataggacagtgtgatttggaaaaaggaaaagtaaggaaagaatgacttataataaagcaatattccaacaagtctaagatgacacttagtaaaatatacagacttaccttatgtgccactaagatttttttaaatgtcaattttaattataaggaaacatcaattgtaaaatatattacaatttctggatgtggaaattatttctgatatatatttaagaaagagaattctagtgggtgcagtggtatctcattattcttttaatttgcattcccctggtaaatgatggagctaaacatatatttatatgcttattgaccatttatatgttttcttttttgaaggatttgagtcttttgaccattattatttggatggtggttttttaaaaaatatattgaattgttgtagttctttatatattcaggattatagtcctttgcaaatataagtattgagaactcctcacaagtgcattcacttttaataggaaacacccaatcttttccacaaaccatactgaaacaactggatatgtatgtggaaatttaatgagccacaactcatatctcatgtcatatctaaatattaatttgagatatgttataggcataaatataaaagttaaaaccttctagaagaatacagaaaatatttttatgaatttggagcatttacaagttcttagacaaaaacaactaaccaaaaatactgttgaattttaatccaaattattattattattttggttagatctgtctcctcctggttcttgaattttctacataaattgtaagggtgtaatgtaaatttctgaaaataaatctagtgggattttggttgcagtataatttattctataaatgtaggaaaaatagaattttaataatatttgagttttctaatccagaaacatggcatacccctcaattcaattggatcatcatgagtttctctctgcattttcagtatgtagggcagaggtttggcacatattttgctaaatttatttctaggcattttgttttttggtagtattacaactgatattttctaaatgtcacttttattcattttactagcaaatgatatacttttgaaaatttaaagttgtacccagcaatactgatcacaattttgaaattcacatcaaaattctaaaattttttcaagaaattattttgtatgtgagtatgtcatctgggaataaagacagtttgaggggggaggagccaagttggccgaataggaacagctccggtctgcagctcccagtgtgagcggtgcagaagacgggtgatttctgcatttccatctgaggtaccgggttcatctcactagggagtgccagacagtgggcacaggacagtggatgcagttcaccgtgtgccagctgaagcagggcaaggcattgcctcactcgggaagtgcaaggggtcagggagttccctttcctagtcaaagaaaggggtgacagacggcacctggaaaatcgggtcactcccaccccaatactgcgcttttccgatgggcttaaaaaatgacgcaccaggagattatatcctgcacctggctcggagggtcctatgcccacggagtctcgctgattgctagcacagcagtctgagatcaaactgcaaggcagcagtgaggctgggggaggggcgcctgccattgcccaggcttgcttgggtaaacaaagcagccaggaagctccaactgggtggagcccaccacagctcaaggaggcctgcctgcctctgtaggctccacctctgggggcagggcacagacaaataaaaagacagcagtaacctctgcagacttaaatgtccctgtctgacagctttgaagagagcagtggttctcccagcacgcagctggagatctgagaacgggcagactgcttcctcaagtgggtccctgacccctgacccccgagcagcctaactgggaggcaccccccagcaggggcagactgacacctcacacggccgggtactccaacagacctgcagctgagggtcctgtctgttagaaggaaaactaacaaacagaaaggacatccacaccaaaaacccatctgtacatcaccatcatcaaagaccaaaagtagataaaaccacaaagatggggaaaaaacagcagaaaaactggaaactctaaaaagcagagcacttctcctcctccaaaggaacacagttcctcaccagcaatggaacaaagctggacggagaatgactttgacgagttgagagaagaaggcttcagacgatcaaactatgggttacaggaggaaattcaaaccaaaggcaaagaagttgaaaactttgaaaaaaatttagatgaatgtataactagaataaccaatacagagaagtgcttaaaggagctgatggagctgaaaaccaaggctcgagaaatatgtgaagaatgcagaagcctcaggagccaatgcgatcaactggaagaaagggtatcagcgatggaagatgaaatgaatgaaatgaagcaagaagggaagtttagagaaaaaagaataaaaagaaatgagcaaagcctccaagaaatatgggactatgtgaaaagaccaaatctacatctgattggtgtacctgaaagtgatggggagaatggaaccaagttggaaaacactctgcaggatattatccaggagaacttccccaatctagcaaggcaggccaacattcagattcaggaaatacagagaacaccacaaagatactcctcgagaagagcaactccaagacacataattgtcagattcaccaaggttgaaatgaggaaaaaatgttaaggtcagccagagagaaaggtcaggctaccctcaaagggaagcccatgagactaacagcagatctctcagcagaaactctacaagccagaagagagtgggggccaatattcaacattcttaaagaaaagaattttcaacccagaatttcatgtccagtcaaactaagcttcataagtgaaggagaaatagaatactttacagacaagcaaatgctgagagatttcgtcaccaccaggcctgctctaaaagagctcctgaaggaagcactaaacatggaaaggaacaactggtaccagccgctgcaaaatcatgccaaaatgtaaagaccatcgaggctaggaagaaactgcatcaactaacgagcaaaataaccagctaacatcataatgacaggatcaaattcacacataacaatatcaactttaaatgtaaatggactaaatgctccaattaaaagacacagactggcaaattggataaagagtcaagacccatcagtgtgctgtattcaggaaacccatctcatgtgcagagacacacataggatcaaaataaaaggatggaggaagatctaccaagcaaatggaaaacaaaaaaaggcaggggttgcaatcctagtctctgataaaacagactttaaaccaacaaagatcaaaagagacaaagaaggccattacataatggtaaagtgatcaattcaacaagaagagctaactatcctaaatatatatgcacccaatacaggagcacccagattcataaagcaagtcctgagtgacctacaaagagacttagactcccacacattaataatgggagactttaacaccccactatcaacattagacagatcaacctgacagaaagtcaacaaggatacccaggaattgaactcagctctgcaccaagcagacctaatagacatctacagaactctccaccccaaatcaacagaatatacatttttttcagcaccacaccacacctattccaaaattgaccacatacttggaagtaaagctctcctcagcaaatgtaaaaggacagaaattataacacactatctctcagaccacagtgcaatcaaactagaactcaggattaagaatctcactcaaaactgctcaactacatggaaactgaacaacctgctcctgaatgactactgggtacataacgaaatgaaggcagaaataaagatgttctttgaaaccaatgagaacaaagacacaacataccagaatctctgggacgcattcaaagcagtgtgtagagggaaatttatagcactaaatgcccacaagagaaagcaggaaagatccaaaattgacaccctaacatcacaattaaaagaactagaaaagcaagagcaaacacattcaaaagctagcagaaggcaagaaataactaaaatcagagcagaactgaaggaaacagagacacaaaaaacccttcaaaaaattaatgaatccaggagctggtttttttgaaaggatcaacaaaattgatagaccactagcaagactaataaaaaaggagagaagaatcaaatagacgcaataaaaaatgataaaggggatatcaccacccatcccacagaaatacaaactaccatcagagaatactacaaacacctctacgcaaataaactagaaaatctagaagaaatggataaattcctcaacacatacaccctaccaagactaaaccacgaagaagttgaatctctgaatagaccaataacaggatctgaaattgtggcaataatcaatagcttaccaaccagaaagagtccaggaccagatggattcacagctgaattctaccagaggtacaaggaggaactggtaccattccttctgaaactattccaatcaatagaaaaagagggaatcctccttaactcattttatgaggccaccatcatcctgataccaaagccgggcagagacacaaccaaaaaagagaattttagaccaatatccttgatgaacattgatgcaaaaatcctcaataaaatactggcaaaccgaatccagcagcgcatcaaaaacttatccaccatgatcaagtgggcttcatccctgggatgcaaggctggttcaatatatgcaaatcaataaatgtaatccagcatataaacagaaccaaagacaaaaaccgcatgattatctcaatagatgcagaaaaggcctttgacaaaattcaacagcccttcatgctaaaaactctcaataaattaggtattgatgggacatatttcaaaataataagagctatctatgacagacccacagccaatatcatactgaatgggcaaaaactggaagcattccctttgaaaactggcacaagacagggatgccctctctcaccactcctattcaacatagtgttggaagttctggccagggcaattaggcaggagaaggaaataaagggtattcaattaggcaaagaggaagtcaaattgtccctgttagcagacgacatgattgtatatctagaaaaccccattgtctcagcccaaaatctccttaagctgataagcaacttcagcaaagtctcaggatacaaaatcaatgtacaaaaatcacaagcattcttatacaccaacagcagacaaacagagagccaaagcatgagtgaactcccattcacaattgcttcaaagagaataaaatacctaggaatccaacttacaagggatgtgaaggacctcttcaaggagaactacaaaccactgctcaaggaaataaaagaggatacaaacaaatggaagaacattccatgctcatggataggaagaatcaatattgtgaaaatggccatactgcccaaggtgatttacagattcaatgccatccccatcaagctaccaatgactttcttcacagaataggaaaaaactactttaaagttcatatggaaccaaaaaagagcccgcatcgccaagtcaatcctaagccaaaagaacaaagctggaggcatcacactatctgacttcaaactatactacaaggctacagtaaccaaaacagcatggtactggtaccaaagcagagatatagatcaatggaacagaacagagccctcagaaataacaccgcatatctacaactatctgatctttgtcaaacctgagaaaaacaagcaatggggaaaggattccctatttaataaatggtgctgggaaaactggctagccatatgtagaaagctgaaactggatcccttccttacaccttatataaaaatcaatttaagatggattaaagacttaaacgttagacctaaaaccataaaaaccctagaagaaaacctaggcattaccattcaggacataggcatgggcaaggacttcatgtctaaaacaccaaaagcaatggcaacaaaagccaaaattgacaaatggatctaattaaactcaagagcttctgcacagcaaaagaactaccatcagagtgaacaggcaacctacaaaatgggagaaaatttttgcaacctactcatctgacaaagggctaatatccagaatctacaatgaactcaaacaaatttacaagaaaaaaacagccccatcaaaaagtgggcgaaggacatgaacagacacttctcaaaagaagacatttatgcagccaaaaaacacggaaaaaatgctcaccatcactggccatcagagaaatgcaaatcaaaaccacaaatgagataccatctcacaccagttagaatggcaattattaaaaagtcaggaaacaacaggtgctggagaggatgtggagaaataggaacacttttacactgttggtgggactgtaaactagttcaaccattgtggaagtcagtgtggccattcctcagggatctagaactagaaataccatttgacccagccatcccattactgggtatatacccaaaggactataaatcatgctgctataaagacacatgcacacgtatgtttattgcggcattattcacaatagcaaagacttggaaccaacccaaatgtccaacaatgatagactgaattaagaaaatgtggcacatatacaccatggaatactatgcagccataaaaaatgatgagttcatgtcctttgtagggacatggatgaaattggaaatcatcattctcagtaaactatcgcaagaacaaaaaaccaaacactgcatattctcactcataggtgggaattgaacaatgagaacacatggacacaggaaagggaacatcacaatattgttccgctagctcaattaataacatcacaataatagtatctcattgtggttttgatttgcatttctctaatgattagtgacgttgagtagtttttcatatgctcgttggctgcgtgtatgttgtcttttaaaaagtgtctgtttatgtcctttgcccactttttaatggggttgtttttgcttgtagatttaagttccttatagatgctggatattagacctttgtcagatgcattgtttgcaaatattttctcccattttgtagtttgtctgtttattctgtggatagtttcttttgctgtgcagaaggtctttcgtttaatcaggtcccatttgtcacttttttttgtttgtttttgagacagtctcactctgtcgcccaggctggagtgtagtggcaggatctcggctcactgcaagctccgccttccgggttcacgccattctcctgcctcagcctcacgagtagctgggactacaggcgaccgccaccaggcggggctaattttttgtattttcttttagtagagatggggtttcaccgtgttagccatgatggtctcgatctcctgacctcgtgatctgcccgcctgggcctcccaaagtgctgggattacaggcgtgagccaccgcgcccggcccacttcttgtttttattgcaattgcttttggcatcttcatcatgaaatctttgccagttgctatgttcagaatggtatttttaagcttatcttctatggtttttatacttttaggttgcacatttatctaatcggtcgagtggattttagtatttggtgtaaggaaggggtcgagtttcaatcttttgcatatgcctaaccagttactttggcacaatttattgaataggaagtattttcttcattggttgtttttgttgatgctattgaagatcagatggttgaaggtgtgcaccattatttctgggctctgtattctgttccattgttctttgggtctgtttttgtaccagtatcatgtcgttttggatactgtagacttgtagtatagtttggagtcaggtaatatgatgcttctggcttcgttctttttacttaggattgccttggttatttgggctctttttggttccatatgcattttaaaatagttttatttcaattctgtgaagaatgtcattaataatttgataggaatagcattgaatctataaattgctttggggcagtatggccatttttataatattaattcttcctatccatgagcatggaattttttttcatttgttcgtgtcatctctgattttttttgagcattgttttgtaattctcatcatagagatctttcactttcctagttatctgtattcctaggtattttatttttgtgtgtgtgtggctattgtgaatggaattccattcttgatttggctctcaggttggatattgttagtgaatagaaataccactgatttggctgggtatgttggcttaagcctgtcatcccagcactttgggaggccaaggcaggcagatcctttgagcccaggagttcgaaaccagcctgggcaacatagcgggacctcatctctataaaaaaattaaaaaataataaaaaaaacccactaatttttgtccatttattttgtatcctgaaactttgttgaagttgtttatcagatcaaggagattttatgcagaggccgtggggttttctagctatagaaacatactgtttgcaaacagggatagtttgacctcctcttctcctatttggatgccgtttatttctttctcttgactgattgctctggctaggacatccaatattgtgttgaataggagtggtgagagaggacatccttgtcttgttctagttttcaagagaagtgcttctagcttttgcccgttcgttatgatgatgactgtgggtttgtcatagatggctcttattttcaggtatgtttcttcaatgcctagtttgttgagggtgtttaaatacgaagggatgttaattttattgaaagccttttctgcagctattgagataatcatgtggtttttgtttttagttctgtttatttgctaaatcacatttattgatttacatatgttgaacttgcatcccagcaataaagtctacttgatcgtgatggattagctttttggtttgttagtattttgttgaggagttttgcatacatgttcataaagaatattggactgaagttttctttttttgctgtgtctctgccaggttttactatcacgataatgctagcctcctagaatgagttatggaagagtcccttctcctcaattacttggaatattttcagtaggaatggtaccagcttttctttgcatatctagtagaatttggctgtgaatctatcttcctgggctttttcttgttggtaggatttttattactgattcaattttgaaactggttattgatctgttctgaaattcaattttttcctggttcagtcttgggaggttgtgtgtgtccaggaatttatccatttgttctaaattttctagtttgtgcgcatagaggtgttcatcgtagtctctgatagttacttgtatttctgtggggtcggtggttttgtcatttctaatttcatttctaattatgttgatttgaatcttctctcttttgttttctttattaattgagctagcggactatctagcttatcagtttttttcacagaaccaatcctcaatttgttaatcttttgtatggtttattatgtctcagtttccttaaattcagctctaattttggttatttcttgcctttcgctagcttttagggttggtttgctcttgtttttctagttcctctagatgggatgttaagttgtcaatttgagttattttgaactttttgatgtgggcatttagcactataaacttctctcttaacactgctttagcagtgtcccagagactgtgatatttttcatttttactctcattaatttcaaagaattttttatttcttcctcaatttcattctttacccaaaaagtttttaaagaccagattgttaaatttccatgtaattacatggttttgagcaattttcttagtattgatttctgttttcattgtcctgtgcttttagagtgcggttggttggtataattatgggttttttgaatttgctgatgattgttttatatccaattgtgtgtttggttttagagtatgtgtcatgtagtgataagaagaatttatattctgtcatttttgggtagagggatctgtagatgtctattaagtccatttggtcaagtgttgaattcaggtcctgaatatatatttgttaattttctgccttgataatctaatactctcagtgggatgttgaagtctcccatttttattgtgtgattatcaaagtctctttgtaggtctctaagaatttgtgttatgaatctgtatgctctagtgttgggtgcatatatattaaggatagttagatcttcttgttgaattaaaccgtttatcattatgtagtgcccttctttgtcttttttgatctttgttgttttaatgtctgcttcttctgaaattaacacagaaactcctgcttttttctgttttcaattttcttggtagaattttctccataattttacttttagcatatttgtgtcattgcatgtaagatgtgtctcttgaagacagcttaccattgctgggtcttgcctctttatccagctgtcactctgtgccttttaattggggcatttagctcatttacatccaaggttaatattgattatgtgtagatttgatcctgtcatcatattgttagctggttattatgcagacttgtttgtgtggttgctttatggaatcaatggtgtatgtacttaagtgtgtttttgtagtggctggttatggtctttcctgtccatatttagtcctcctttcaggacttcttgtaaggcaggtctggtagtaataaattccctcagcattcgcttgtctgaagagaatcttatttcttcttcacttatgaagcttaatttggctggatatgaaattcttggctggaaattctgttaagaattataaatatatccccctaatctcttccagcttgtagagtttctgctgaagaattcaaattcactgttagcctgatggggttacctttgagttgtgcccattctctctagctgccgttaacattttcttctttaatttcaaccttggagaatctgatcaattatgtgtttgggggatggtcttgttaagttgtatgtcacaagggttatcttcatttcctgagtttaaacattgacctctctggtaaggttggggaagtttacatggatgatattcagaaatacattttccaagttgctgccttatctgcatctctttcagggatactggtgagtcatagatttggtctctttacataatcccatatttctcagtggttttgttcattctttttcattttttttttatttttgtctgactgagatggttcagagagcccgtgtttgagctctgagattctttcttcagcttgatctattctgctgttagtactcgtgcttgcattatgaaattcttgtcatgtgtttttcatctgtgtcagattgctttggttctttcttaaaatgaacattttatctcttgtctctgggattgttttattataatccttagattccttggattgggtttccaatttttcctgaatctcaatgacctgctttcgtgtcactactctaaattctatttctgtcatttcagccatttcagcttgcttaaggacccttgatgataaactagcatggtcatttggatgaaagaagatactctggctttttgggttgccagagttcttgtgccgattctttcttatctgtgtgggctggtgttcctttaactgcagtgtaatttgagtatagccagtagacttcctttctggatgtttttagagggccagggcttcgcggggcctttaattgtagctgaattcttacccttggcttcacaggggggttacgtcagcaaaatatttttaatgttggaggtggggctatgattcagtagatggctcttaaagcatattggtccctaggtagggaccaattgctcaaccacatggcttctctgtatttcctcacagttatagctgtgctctcttgcagtgctctgaaagtatgggctcctttcccactcatgtgctggctgcagatctcagcttggcactcctaggctgcctactgtggctctgaggtgagctcaggctttatgttctctcctcaactcagagacagcatggtaagggacctcggcactgattgtggcggagggccttttacatgtctcttggggctctacctcagagagctgcagagtcgctgtcaatcagtgtgactggcccggggtggggtggctgcactgtgggcccaggggggccctgccgggtgacaagcaggtggggtaggaggcttataggggagacagactggccttttctccttagggcaatagcagcttgctggaggtatggttaaagcactcaggatctttgctcctttcccagtctgagggcagccaaggcggcaccactgcagaggcagtggcagagggtgtctgggagctccacctcagagaaatgtggagcctctgctactgggaatgttcagccggagggtgggctggctgtgctgctggcccaaactgggggctctgcttggtcaacagtagggatttaagtgcccatgggaaggagagactggtctcctctccttacggtgactatggtgtgctggaagcttgagtgaagcccttaggctctttgtttcttccccagaccaagggctgcagaggcagaagtgctgctgtggcagtagcagaggagctgtccgttgcctctgggagcccctcccagggggaacacagagccaccaccactgggtgtgctcagccgggagtggtacagctgatctgccgtcctgtgctacgggtcctgcctggtagagagtgaggggtaggagctcacagggaggagagactatgctcctctctgcatgatggctgtggtgtgctggaggtgccatagtagcgatcatgccttttgttccttcctcagcccaaaggtgcttagagtggtaccactgcagctgcaatggcagaggggcagtaggttgtctctgggatttcctcctcaaagaaatgcagagccacctcctatggaagtgttcacacggggaaaggatagttgtgctggaatcccaggtggagaggccttgtccggtgaggagaagtaggaatggagacccatgtggaaaatagtctggctgcttttctgcggggcagctgtgctgtgctgagggtctacaccagtctctcaccaccatgcaccatgttgagggcaacagtagtgagggctgcagggcagcaaaactagcagcctacctctccctctgggagctccatcctagggaagtgcagagtcctacaggcccaacagcccaggcagggctggtgtggccatgctagggtcccagaccagtgggccttatcctgcgaagtacagtccatggctgctcagccctgtggatttggccgcttttctgggggtatgcgagggaccctgactttccctgttgccagggttgcagctgcgaatgccacgatgcctggggatccaaggcccttagcacttcatgtgtgcctgagtggcagctctgccgagactccatatggctctccacgtcagtttggcagccccgtgggggcattcacaggggatctcctgagctcagagttccaaaggtccatagcagaagtgtgggtctccgggactcaatcactcaccatttcccacagtggggggacctcccctgtctccgtgcctctccccacgggtgcgtgctcgtcctttcctggtcctccgtgagctgagttgtttccttgatgaattccaatgtgtccatctggatggtccagttgaagagctaatgtttatcagctactctttcccctctccgtgacagcagtgcacactggctgcttcttggccctccccatcctatatttttttttaattaactttttccctctaccttattttatttttatttattttttattgcctgttctaggactaagactatgcattcttatacaagtcaacttaacatcggtattataacacttcatcctgcacacttgatgcttagtgcttacctctgtaataacattacagcaacacaattccgtttacccatcacccctttctttgtgctattattaccatatcttctacttataaggcctatcttataatgatgttattttttcttgctataaataggtaattgtctttaatgaaattacaagaagaacaaaaacattttatatttactaactgatttatctttttcaacaggttttttttccccctttcctccagattcaactttttatttggtttcactttcctttagtctgaagaatttcctttggcattcttgtagtgcaaatgcgctgaggatggattccattgctttcctacctaaaaaccctttgcttcatacctattttttgaagtatacttttggaaggtttataaaccttggatgatttcttatccgtcttttttatttcagaacattaaacacgtcttttcattttctctgtctctcattggtttctactgaaaagttgatcacgttttttatcattgtttctctacatgcaatgtgtgttttctcttgctggctttaaaatattctctatagctttggtttacagcaactggattataatgtgcctacatgtggtttactctgtcttttaaaaattatctcagcaatgttttgtagttttcagtgtacaggctttacccatttttttgttagacttattccctaagtaatgtatatattagggtattgcaaatgttattttaaggtatcaatttctgattgttcattgccagtatgtagaaatacaataggcttttgtagcagaataccattgatttttgtatattggtccattctataaccttttaaaatccacggattactttttataagaaatttttgaagattttattctgtttcatatatcatgttagattgttaattataacttttggtttatttggtcattgctttagaatacatcttatttaattttaacttacacaatctatcttcaaatgatagtatactacatcatgtgtagaagctgtataataatatactttcatttttgttctcctttccttaaagtaattgtatacattttacttacatatgctttatatataccataatatattggtattatttttgtttaaacagttaattattgtttaaataaatttaaatgaggctgggcatggtggctcatgtttgtaaccccagcattttgggaggctgaggcgggtggatcgcctgaggtcaggagttcgggaccagcctgaccaacatggtgaaacttcgtctctactaaaaatacaaaaattagccggttgtggtggcaggtgcccataatcccagctactcaggaggctgagacaggagaatcgcttgaacccaggaggcggaggttgcagtgagctgagatcatgccactgcactccagcctgggtgacagagtgagactccatctaaaaaaataaaaataaaaataaatgataagaatctgatatatttacctatatagttaccatctctagtgttcttcattttttttttgcttctacctggcataattttttttctgtctgaaaaacttttatcctttgtagtgcatgtctgaaaactcagctcttgtatgtctgaaaatgtttttattccaccttttttatgaaagatatttattttcctcaatatagaatttaagtttaagtgtcctcctctgccctattgctttaaagatgtggctccacagtcttctttcctgccttgttcctgatgagaaacctgctatcaacattacctttgcttctctgtatcaaatatttatttttctctctggctacttagaaatttttttctttatcatcagttttcagatatttaattatgatattctcttgggtaattttctcatgtttcttgtggttgggattcattgagatgctttgatctgggggtttcttgttttcatcagatttgtgtaatttttagccattagattttcaagtacttatttttcccctttctctacattgttccatagctctctagtgtactttaagttttttttttaaacaaatctttctttctgtattttatttcaggtaaatttctatttataggtctccaaattcattattttttcttctgcagtgcctaaactcctaacctaatgcattgtcttttttcatctcaaatattgtagtttttgtctttataaatttagcctggatcttcataaaatctttcacatgcataatttttcagatgaatacagttagtataataattttaatgatcttgcctactaattctaaacattggtatcacctctaggttgatttagggagaactgataaatttacttctaattatgggtcaggtttttcgattttttgcatgtctggttgtcttatatgctagacattgtgaattttaccttgttggatggtccatatttttgcacttctgtacatattcttgagcttcattttgagagtaagttaaattacttggaaatagttggattatttctttatttttccttgtctattgtttttcttttaatttaattttaagttccaggataaatgttcaggacttgcagatttgctgcgtaggtaaacatgtgctgtggtggtttgctgcacctatcaaaccatcacctagatattaagtcccacatgcattagctatttatcctgatgctctccctaccccaccaccctgaccagccccagtgtgtgttgttcccctccctgtgtccatgtgttctcattgttcagctcccacttataagtaagaacatgtagtgtttggttttcttttcctgtgttagttaggataatggcttccagcttcatctatgtccctgcaaaggacattatctcattccttttgatggctgcatagtattccgtggtgtgtgtgtgtaccacattttctttatccagtctatcagtgatgggcatttgggttgattccatgtctttgctattgtgaatagtgctgcagtgaacacacaggtgcatgtatctttatactttatttatattcctttgggtgtatacccagtaatgggattgctgggtcaaatggaatttctggttttaggtctttgaggtttcaccacaatgtctgccacatggttgaattaatttatattcctaccaaccgtgtaaaagtattcctatttctccacagccttgctggcatctgttgtttcttgactttttaataattgccattctgagatggtatctcaaaataataagagccattaatgacaaatccatagccaatatcatattgaatgggctggaagtattccccttggaaactggcacaagacaaggatgccctctctcaccattcctattcaacacagtattggaagttctggccgggacaatcaggtaagagaaagaaacaaaggtattcaaataggaagagaggaagtcaaactgtctccatttgctgatgacatgatcttatatctagaaaaccccattgtctcagcccaaagcttcttaagccaataaacaacttcagcaaagtctcaggatacaaaatcaatgtgcaaaaatcacaagtattaatatataccaacaatagaaaagcagagagccaaatcatgaatgaactcccattcacaatgctacaaatagaataaaatatctaggaatacagctaacaaggaaagtgaaggacctcctcaaggagaactgcaaaccactgctcaagaaaatcagaaaggacacaagcagatggaaaaaaaaacattccatgcttttatggataggaagaatcaatatcatgaaaatggccatactgcccaaagtaatttgtagattcaatgctatcaccattaaactgccactgacattattcacaaaattagaaaaatctactttaaaattcatatggattatttcaaatctggtgattgttgctggtatgggtaggctttgcatgcctgcccaaatctcatcctgaattgtatccccgtaatccccataatctccatgtgtcaagggagagaccaggtggagataattgaatcacaggggcagtttcccccatgctgttctcatgatagtgagtgagttctcatgagatctgatggttttataaggggcacttcatgcttcactcagcacttcttcttcctgctgccttgtgaataacctgtcttgcttccccttccccttctgccataattgtaagtttcctgaggtctccccagccatgctgaactgttagtaaattaccaagtctcaggtagttctttatagcagtatcaaaatggactgatacagtagctctttctgttattataataataattattatgtaattattggaaatgttgacagcacattttgcaaactagatctctttcctgaaccctgcttcttttacctctgtacaatgagcatgtagcttcctatgtcagtatgcctccagcagtaatgtgatgtctgtgtgcagttggtaaaataaattttgcacgattctactcaaaagttcttttttacttcacacccaattcacctgttgccgtgatatcctcacagtttttaggtttaactaattactacaccagtctgtggcaaagcttttcagataaggtgctagagtcccagctgccttaaagaagaattgctaatgaagtcttgggatgaataaaatatcatgtcttccatcacccctttataggatgtccaggattacttgtactttgaaaacggctatcattctttaatgacaacttgttaacatttagattatcgttttgtgttctatgaagtaaccatgctggcaggctacaaagggaaattggtattaaagacatggaacagtcctcctgcctggaatgcataacttgttttcatttggttcataggaagtaccgactgaagcaaaaaaatatccaactgctccaatgagcccagaatacttctgtcctaaaaagtgcatttgatcctcaaactgatgatgtgtgttgtttctaggtttagagcgcactaaaattggagccatagaatttactgaaaattatgttaaaacaagtgatacagggtcttgctactcaaagtttgttgcacagataagcaacaccagcatcagcttgttaggaatctgggcaaagcccagactttctgaaccagaagctgaattttaatagtgctgccagctaatttgcagggatgttaaaatttgagaagggtcagtctacaacaattgtttccaaatttagctgaatatgacaatcacctgagttcattttaaaactacatattctcagggcctgttggaaattatagttatgtggaccctaaccctgaggatacttttttgatggattctgaaagtttgaaaactacaagtaagagctacttaagaaacagtgagccggctaccgtgaaatgtgcaaaaatttagcaaaattagaaattgaagtgatttttattgctcggttaagactgtttttgtgtgtatgtctgtgtgtctgcatatatgcatgtgtgtacatgtatgtgtatatgcatggatatatatagcatatacatatatgtgtatgtatatatgtaatataggtaaatgttcagatatatttatatacagtacaaacatcaggcatgaatatgtattatgttatatacatgagcatatgtttagctattagtgcttatgaataataacacaacagcaatatctaatacttattgagagtctgctatgtatatgccaagcactatttaaagcccttttactaacttatttcattaccatgacagttagtaattatcattctaaatatatgtatatttagatacatataaacatatattacatgttttataaaaatacataatatatctgtacatataaatttataagcatatataatatatacatatgtatatatgttatacatatttgttatactagaatcaagtccaaatgttaagtgattttaatttatgccaacagtagtggcccattcctgtttttatttctgatactaaaaaagcgagttacagttacatttttaaatcctggcaaaaggatttttatacctgaaaaatctgcactttttcacattcaaacacacacacaatgcaaaatgcagcttatgtaatgacaaggctggttgcaggtgatatggggagccattccatgggttccaaattacaaattcttgcactaacttctgagatccttaagggaagaaagtgtccttattggtatttttacttctggttcccgatacagtgtctagcacagtgggagcaccccatcactagctgttatattgatcatgtaactttttatttatttatttatttgagatggagtcttgctctgtcacccaggctgaagtgcagtggcatgatctcggctcactgcaaactccacctcctgggttcatgccattctcctgcctcagcctcccgagcagctgggactacaggtgcccaccaccacgcccggctaatttttttttttgtatttttagtagagacggggttttaccgtgttagccaggatggtctcgatctcctgaccttgtgttccacccgcctcggcctcccagagtgctgggatgacaggcgtgagccaccatgcccagctgatcatgaaactttttaatagtcagcaatttagtccttgattttcgcgttcattgaatgagagaaaaatgtcaatactagcgagaataattattgcagaatttggatgtatactataaaacaagtccccaacagtgcttcttgcacttcagtgtgcacaagaatcatttgggattcttgtttaatgcagattttgattcggtagttctggagtggggcccaagatcctctatttctagtaattccccaggggatgctgtttacgctggtccaaggatcagcataccctggggtgcaaaataatagaagacatatgaggaaaagaaaggagctttggttcacatcccagcttctgcattactaacttcacaacctctgttaatttcactcattgagtgcatatttattgagcacttactatccaacatgcaatactccaggcctagagatagagtagtggacaagatcaatactatcttgttcctattggatctagttatctaattacctacactttaataatagaatcttttctcaaaagcttgttggcaatgaaatgagcttatgtaaataaaccacccagccccagcacaatgcctggcacatagtaggtgttccatatattacttgttttgaggacataagctcagataccctcatatcgtttctgtatgcaagctcttcagggctagccttgatgttggcaatatgataaccagctggaaatcaatgaaggacagtaaatcaaggttcttatgaataatacattaggttaatattatgcagtataatggggagctgactatatataatttaaagaggctgaatgactttttggagtaaattcttggtcatgaatcaaaagccatgatctctaatctttagtttttcactgaagttttttgaatttctagacagatcctcataatttacactccgcttcctataaaataagggagtatggaatcaactcatgtggaaattgactgttaaaagacttaataattcaattcaacaaatatttattgagtgtctataataaagtattcactattgaggacaaaacttggaagtaataagtgaatattcaaagaactttgacattatcaggaaaacaatttgcatttgttcatctgttttattcatttgctaactcaatgcatactttttatttatttatttatttctttttgagatagagtctcgctctgtcactcaggctggagtgcagtgacatgatatcagctcactgcaacctccacctcctgggttcaagcaattctcctgcctcagcctcccaagtagctgggattacaggcatgcgccaccaggcctggctagtttggtattttcagtagagacagggtttctccatgttggtcaggctggtctccaactcccaacttcaggtgatctgcctgccttggcctcccaaagtgctgggattacaggcgtgagccactgtgcctggcctcaatgcatacttattaagtgcaatcaagaaggaacaaagatgacagttctcgatcttgagggggcactaaaaatagatgcaagcaaattgcgcaaaactgttatggggtgaaatggacagtcatatgaggaaatggcaaaacgagagtcacagataacaagaattccagaattttaaaatttacagagaaaagaaacatctgcatatatttgaatgtttagcaacagatatttatatcactggagtgtacttaaggctaattattaagatttggtcagtttggatgatgatggaaaacattattgaagagaaaaacagtagaacttgatactgattacttgctatgcaccaaggaccataagagcaagtacattttgtcgagggagaatttcctgtccaacagcaaaggcaggtaaatgaattaaaataaattatactagatacccaagtggagctacgtatgtacaaagtgattacagagaacagaggtggaaggatcagagcatagaggtggaaggattaaattctgtagaaatgggtgattttttttgaggggtgggagtttgatgatttagagaactcagacacttcttgagaaggttgtgatttacagttcaaataggagttttccaggtggaagagggggcactccagacagagaaatcagcatgaggagcaacatggacacgtgaaatatgcactgtcttcaggaactgtagtctgctgttgctgaaacctaaagagtgaggcagggattgatgagggaagaaaccagggtgatggctacagagcaggtttgaaagggcccaaagagctttgtctctgaaagggaaatgttgtggcacgaggaaataggactaactgaagaaaaaggtttgcatgagacagaactgtggttttctctcaggtcaagtttcctagaagcagatcctgagatgaagatccatgagaaagtcacttagaggagctgttcccgggagaaaccggtaaggaagtgaggaaagcagaatagcaactggagggggtctaatcccacagaggtggcctcagcctgatcttgcaaggggttggggattgcggactatgcctcagagtcatcccagcctcaggcaaagactctgggcttccagagtcttgcaccagtcagtcactggctaaaggctgcccctggagagacagaaaacatttctcattctctgctttagagggccaagtggctccagaaggcaagagcagttttcagaaagagacacaagggcggccatttgtagttgtaaaagcacactggagctgggagggcaggagagatgaagaaaaatgctagggaaaagtaagtggttagtattttacaaatcttatcctaaactcgaaggagagcaagcagcaagggtattttcctctattttgcccattttctacattttatcctcattcctttcatttcatttaatatctgtaagtgtcaatctaagatgcacgttgcaatctcttgggagagcttcgaaactgtactaatttctgtgtctcatttcagaccaatcaaatcagaatatctagaggtgggattcaggtattagtattctttaagcttcatacattattccaatgtggatcaaatggagtggggacaatggtgctgtggatttttattgcttagaaatgctgtgatgtggccaggtgcggtggctcccgcctgtaatcccagcactttgggaggccgaggcgggcggatcacgaggtcaggagttcgagaccagcctgaccaacatggtgaaaccttgcctctaccaaaaatacaaaaattagctgggtgtggtagtgcatgcctgtaatcccagctactcaggaggctgaggcaggagaatcccttgaacccgggaggtggaggctacagtgagctgaaatggcgccattgcactccagcctgggtgatagagcgagacaccatctcaaaataataataataaaaaaagaaatgctgtgatgtgaatactagatacaacaatcaatggaaaaggaccgacacatcactctaactccgagaatggttataccggctacagaattgcagtgcctttcaagtagactcccaatatgtttccaaatgaagtcccatctgagagctagtgtctccaagatacatttttattttaagctgtatcccttgatctgaataatatattttgtacccatttaatggtatataataacatattaaagagctcttcaaaagatgaaacagatttaaattactttagattatttatattactaaaattaagtgtttatgggccagggaagtcactatgttctgtattttgtgtttggttattaccatggggaaaatggctttttattgtagaatatatcttaataaagtcatataatgcagtgattagaaccacaagctgtgagtcagacatatccaggcccaagtctaccgtctgtagccagagtccttattccttcctcggttccttattctgtccttggctggtttgctcttttaccaaaaggaaatagaaatttctacctcatagaattgctgggaggattaaatgtgataagtagattaatagggcatttgacatacagtgaatgctcaatgaatggctgctattattgttgttttaatttaattaattttcccactgtagttcatgtaaataaacaaataaacatcctttaaagagtagtggaagttttttttttttttccctcaaggggaaaaaaggcacagagtccttccttctgaatgcctgaaagccctcttagttgtacctctgaatttgaagcccctggatgcatcttttaagcaaaggacatatgcgagttttgtgtatgcaccaaaaactcatatccatgaatttcttatgtcgactgcaatctgcaaatgacaatctgtttctgggactccagattgtgttcaacattgatcgataattatcacatttcagagttgggtgctcagtgtcaagttgctaaaagtctgacagacatatttcatgccaggctcatttgtcatctctgataagtagaaagtacagagttttcccaaagtagtcagcgccacactctgctctgcaagatcccttcactctgatgtatgctccaagattaattttccatcccaagtgctcttggatacagccacaagcctgattctcttctcattaatatttggtggcatacatgctgccagcttcgtggtgaataagtggtgatgattattctgggtcaggtgtggacttcagtagctgctgtgtctaaataggaaggtccgtgtttgggaaagaaacatgctcattgggcaagaatgagataatatagtaataagttctgcattaattttgaaaatcataaaatatccagtataatttgaaggtcagggactgtgtgttactagaattttttatacatgatttgcttttctctcagcatccttaaatatacactatcagttccatttcacagattagtaaactgaggataaaaaggtatcttccttaaattcacctgaataataataagtggtggagtcaggatttcaatgcacatttctccaaatctatagctagattcagattttccactgaaccatgctgtacctcatgtcttcaatgtctctttctgtgaaaaatcttttattcaatcaaatacgagcttgtttttaccctatcatctcttcctatgtaatttcccagagaaaaacttttaaaaaagtctgtagttagcaccttcacttctaacttccacccaaagagtataactttctgaccttgattggtaatttgattggttataaaattctataatcaatttgcctaattatagaattctgagttcaatatcttttcccctcagaacactgaggattggactcagccttgagatgtagaatgtttttttgtttttttcttttgtttgcgattttgtttggtggtgttttgtctttccagtaaatatttcataatcatcttcttcattaccattctgagtgtattatatatttctttctacttgatactttaaattgtcctttcaggctgagggcttataccacatttttcttcatctaaggattttactctattattctttgattatattctatccctcattatttcagttctctaccttttctaactcttattagttgaattctgggcctcttcgatctttttcttcatgttttaagcttttctcttttattttgatcttttttcctcttagttctctcatgtagaaaacttgttcaactttatctagctttttctagctcattaatatggctctgaactctactcttctttatttctcagtctcagaattgtttatttccatgtcatatttttaattcaaaatctcttatcttaaaaaaatgttgtgattgctctttttatgtagcagcacattctttattgatggatgcaatatttcttctgagataaatggatgaaagttactcatgggcagagcatccatcttatgcttttccttcgtacccagcccttgagcctctctaccacttctctctcaggctccaacactctcatcaggaggatttcccaaagcagttcaccactcagaaagcagtctacgtaaggccagatctgctgctctccataggagggagccccatcttccctgggtgttctgaatgctgtacctcaatgaattaactggtaattaattatgccagttgccatagggctactgataagagcctttaatttaattggagagttgtaggttgagtaagtctttttggaggaaatgtacttaagctgaggttggaagaatgtggaagatagaaatcagttttcaagatctgcacattcttcctttcatctctcccatctgcaatctcattctatgcctctgtgaggcagaggctgctagttgcctacctaatgcccatgaccactccattcctttattagcagaatcctgatttttgttcagggaaaataatgtgccagccagataattttctttgctttctatccaaccacttttagagctagagagaggagatccagtagcacggttttggttattgagatacaggtagaaatccctggcaaagacagtccttcctaaataaaaacaaaaagcctgtctaggagaaaacactttatttgccttgttaatgtctggtacaaggatgcaatacctagagttacagcacacattctgaaaccatgaggaaccataagccacatgccatacagacctgaaatggagatgaagcctcaatttttagtcacaatcttgagcaactgcactggccatggaaatgttcctccagaacttttaaggaagaaaaataaactcgtgtaattgagtcatttttggatttactgtcatttctagatcaacattatcctaaagaaacatgctagctcttagaagctactagatgagtggttctccaggtggcggcccccagactagcagtatcagcacctcctggaaacttacagaaatgcagattgtcacgcttttatcccagacctactgaatctcgtactgtggagaagggatctaagcaatctgtgttatgacaaatgtctcaggtgattctgatccacacactaaagcttgagagtcactgtaatagagtcatgattcaatgggctactttaaatttaggctttctttccttgatattttttagtacattgcaaaataaatatccttctaatgaagttacatataatatattgtctcttttctgttaaaacaaccatcgtgactccccatcacctacaagactgagtaaaatcatctgagttaattctttaaagctgttgaaaatactgtcttagttatattcttcatttaaacttttcttgtatggtcaatatatatatttttcaaatcacatgggtcaggcaaaagtactaactttctgtggactgaatacatttctcaactcactaacccaccccgggatctgtatgtcacatctttgtcctcatctccttatttttttttttaatttttgaggtttcaatattttattcaagttatttttaagtgacgttaattacagcatttgaaggggaggatctgattgcacacaaaatggaggactctaaaatgtacccattaaactgctaaaaaacaaattgagtggtgagaatacaacagaaatccaatttagattctgagtgttgtcaccatgtgatcacaatcacacaggctctttcaagcttatagcgggagctcctggaagctatttcatactcgggtgcaagggcaaaaaaacacaacacaagaaggtataagtccttattggcttcatcacgtccaccctctccaccccaaaatggcgcaaaagaaacagtgaccacaccctgcagaccttttggtgtaaaagaggtgacaatgaactagggtgggaacaggtcatgtttatctttatccttggaaactctggacgtcattcaccatacatggtatatacgaccaccttcttgaagcccggaggaggttctctttctctggatcatatgaaccctcatttgtcccttttgatcatactttgaattgttgtcatggtattcaggtgttgatttatggaactgaacaatatacctcaataattatgtatacaaagaatgcaacatataattaaaattgaacaaagttaattttatgcataaatgcatttttcaaaaatatgtgtaaatgttgaatctaattattatattatgaatgctgaggtgctatgaattaacttttttatcatgccatcggggacgctgacactgaaagacaggaataagtacttccattatcaacaaatgattttaaatttaaaggtgataagatatttctttaaaaataaaaagcaaacttcacaattacagcacaataagtatcttaaattaggcagaaaacacgctttttttcttaaagaaatatgttaagatatgaaattgcatgtatctgtcatactttgtcttttaaaaaacaagtctcagaggtaactatggagagctattcagtttatttcaataactcctggttaggagactcaccctttatttacataacttaactcacaatttttacattctttgaaaaattaccatgcagtgagttttttttctttttttaagaggggtaagaagctatatttaattatatgacaaggctggctttttcttttttatttttttttaagtttttttttcttttattattatacttttaagttttagggtacatgtgcacattgtgcaggttagttacatatgtatacatgtgccatgctggtgcgctgcacccactaactcgtcatctagcattaggtatatctcccaatgctatccctcccccctccccccaccccacaacagtccccagagtgtgatgttccccttcctgtgtccatgtgatctcattgttcaattcccacctatgagtgagaatatgcagtgtttggttttttgttcttgtgatagtttactgagaatgatgatttccagtttcatccatgtccctacaaaggacatgaactcatcattttttatggctgcatagtattccatggtgtatatgtgccacattttcttaatccagtctatcattgttggacatttgggttggttccaagtctttgctattgtgaataatgccgcaataaacatacgtgtgcatgtgtctttatagcagcatgatttatagtcctttgggtatatacccagtaatgggatggctggatcaaatggtatttctagttctagatccctgaggaatcgccacactgacttccacaatggttgaactagtttacagtcccaccaacagtgtaaaagtgttcctatttctccacatcctctccagctcctgttgtttcctgactttttaatgattgccattctaactggtgtgagatggtatctcattgtggttttgatttgcatttctctgatggccagtgatgatgagcattttttcatgtgttttttggctgcataaatgtcttcttttgagaagtgtctgttcatgtccttcgcccactttttgatggggttgtttgtttttttcttgtaaatttgtttgagttcattgtagattctggatattagccctttgtcagatgagtaggttgcaaaaattttctcccattttgtaggttgcctgttcactctgatggtagttcttttgctgtgcagaagctcttgagtttaattagatcccatttgtcaattttggcttttgttgccattgctttttgtgttttagacatgaagtccttgcccatgcctatgtcctgaatggtaatgcctaggttttcttctagggtttttatggttttagatctaatgtttaagtctttaatccatcttgaattgatttttgtataaggtgtaaggaagggatccagtttcagctttctacatatggctagccagttttcccagcaccatttattaaatagggaatcctttccccattgcttgtttttctcaggtttgtcaaagatcagatagttgtagatatgcggcgttatttctgagggctctgttctgttccattgatctatatctctgttttggtaccagtaccatgctgttttggttactgtagccttgtagtatagtttgaagtcaggtagtgtgatgcctccagctttgttcttttggcttaggattgacttggcgatgcaggctgttttttggttccatatgaactttaaattagttttttccaattctgtgaagaaagtcattggtagcttgatggggatggcattgaatctgtaaattaccttgggcagtatggccattttcacgatattgattcttcctacccatgagcatggaatgttcttccatttgtttgtctcctcttttatttccttgagcagtggtttgtagttctccttgaagaggtccttcacatcccttgtaagttggattcctaggtattttattctctttgaagcaattgtgaatgggaggtcactcatgatttggctctctgtttgtctgttgttggtgtataagaatgcttgtgatttttgtacattgattttgtatcctgagactttggtgaagttgcttatcagcttaaggagattttgggctgagacaatggggttttctagatatacaatcatgtcatctgcaaacagggataatttgacttcttcttttcctaattgaataccctttatttccttctcctgcctaattgccctggccagaacttccaacactatgttgaataggagtggtgagagagggcatccctgtcttgtgccagttttcaaagggaatgcttccagtttttgcccattcagtatgatattggctgtgggtttgtcatagatagctcttgagaataattttgaagactttactgaaacacaatatgcagaatgttagaaaaacatgatatacacccaagggatcacaaaaatgttgatatatttaatatatttttccaactatttaatactgcatatacataaaaatgcatacacataaaactggtaaaactgaaaactcaccccatatgttcttaatatctatcagttcctatgccattctttcattgcatttatatgtagacatatacatattttttcttacctacctcatatgatatgctactttatatcatgttcatatacatgctgctttaacctttttaattgtatcaaatatagaattttaccctatttaaaaatgtattataaaaatacagcataatttatttaattagtcctttattattacagatttgtattatttccagagtgtattaccagccagattataaaccagagtgtactatttgttcttgaaagaaaattatcacatacaaacatgactgttttttctttaggatactgtaccaacagtaattgttggctctatgtttttaaagtcttttcgtatgtagttcttagctttccaagcttttctttttctttttctttttcttttttttgtgtgtgtgacagagtctcactctgtcacctagactgccatgcaggtgtgtgatctcggttcactgcaacctccgcttcctgggttcaagcaattctcccacctcagcctcttgagtagctgtgattacaggtgcctgccactatgcctggctagttttcctttttcttttttcttttcttttcctttttttttttttttttttttttgtagagaagtttagctacattgccagactggtctcgaactcccgacctcaattgatccacccacctctgcctctcaaagtgttgggattacaaggtgagccaccacacttggcccctatcttttcttacagtcattatattcttatatatgtacctgcatttttgccccgacatttagagaagtgttttattggatttcaaaaatgtaagagttttattttgttactgatttctagttaaaattatttgttactgtggccaggaaatttttaccttctgaatttaattgattttttttcataaataacaaaataggtattaaatttggacattaaaaaaatcaagttggggccaggcgcagtggcttacacctgtaatcccagcactttgggaggctgaggctggtgggtcatgaggtcaagagttcaagaccagcctggccaagatggtgaaaccccatctctactaaaaatacaaaaattagctggccgcggtggcggattcctgtaatcccagctacttgggaggctgaggcaggagaattgcttgaacccagaaggcggaggttgcagtgagccgagatcatgccactgcactctagcctgggtgacagagcaagactgtctcaaaaaaaaaaaaaaatcaagttggactgtcagaaagtgaaagaagcgtttgttcattcatgtattctttcatttgtttatgaataagtcatacatggttcctgttgcctttagatagatttgggctattcctacataaaaactcatgacatttacatgtctgaccttttactgaagtaatttagttatgttaattcagcttgttcaattagcttgtattccacgtattttaacaaggaatcataattcttttgagttttaaattatgatttgtttatttttgtatatgctttttactttttaatttatagattcaatgctatccccatcaagctacacttgactttcttcacaaaattaggataaactactttaaacttgaaatgaaattaaaaaaagagcttgtatagccaagacgatcctaagcgaaaagaacaaagctggaggcatcacgctacctgacttcaaactatactacaaggctacagtagccaaaacagcatggtacttgtaccaaaacagatatatagaccaatggaacagaacagagacctcagaaataatgccacacatctacaaccatctgatcttttgcaaacctgacaaaaacaagcaatggagaaatgattccctatttaataaatggtattgggaaaaccagttagccatatgcagaaagctgaaactagaccccttctttacaccttatacaaaaattaactcaagatggattaaagacttaaacgtgagacctaaaaacttaaaaaccctagaagaaaacctaggaaataccattcaggatataggcatgggcaaagacttcatgactaaaacaccaaaagcaatggcaacaaaagccaaaattgacaaatggggtctaatttaaactaaagagcttctgcactgcaaaagaaactaccataaacaggcaacctacagaatgggagaaaattttcgcaatctatccatctgacacagggctaatatctacaatctataaggaacttaaataaatttacaagaaaaaaaaacccatcaaaaactgagcgaaggatatgaacagacacttctgataagaagatacttatgcggccaacaaacatatgaaaaaaagctcatcatcactggtcattagagaaatgcaaatcaaaaccacaatgagataccatctctcgccagttagaatggtgatcattaaaaagtcaggaaacagcagatgatgcagaggatgtggagaaataagaacgcttttacactgttggtgggagtgtaaattagttcaaccattgtggaagacagcatggtgattcctcgaggatctagaatcagaaataccatttgacccaggaatcccattactgggtatatacccaaaggattataaatcattctactataaagacacatgcacatgtatgtttattgaagtactattcacaatagcaaagacttggaaccaacccaaatgcctatcaatgatagactggataaagaaaatgtggcacatatacaccatggaatacgtgcagctatacataaaaaaagctgagttcatgtcctttgcagggacatggatgaagctggaaaccatcattctcagaaaactaacacaagaacagaaaaccaaacactgcatgttctcactcataagtgggagttgaacaatgagaacacatggacacagagagggaaacatcacacatcagggtctgccaggggtggggggctaggggagggatagcattaggagaaatacctaatatagatgacgggttgatgggtgcagcaaaccaccatggcacgtgtatacctatgtaactaacctgcatgttctgcacatgtatcccagaacttaaagtataataataaaaaaagaaaaaaatatttcaccatttttcaatttgtgttaaagatgtaagcctgctaatgttaaagtagttgtgatacaaaacattttatccattctcacaacaattcaaagatctaagaccttaaattggtagtaatttttggatcagcaccatatataagctattatgttatttgtaaaatacatttctgtcaccttataactttcataattctgtcaaggatccacggtatcgtcactgtgagaatagattattagatgcaaaatgcatcgtaactatgccttacttatgtttgcactattatatgttgttttgatttttataatagtttaatagtttattatatagtaataattctctttttttttcttttgagatggagtctcactctgtcacccaggctggagtgcagtggcatgatcttggctcactgcaacctctgcctcctgggctcaagtgactctcttgcctcagtctcccgagtagctggaattacaggcatgtgccaccacacctggctgatttctgtatttttagtagagatggggcttcaccatgttggccaggctggtctcgaattcctgacctcacataatctgcctgcctcagcctctcaaagtgctgggattataggtgtgagccactgcacccttctatgtagtaataattctaatattgctaaattttatcctaatatgacagtcctaatactgcttctttattttttggatgaatgaaaacactgatttgagagttctgacagtagagggtaaatacattgagatacattaactggagaggtaattttagatattaaattaatgaggaaatggaaaaatttaaataaagtcttactttgcacaataggtagtaagtttatggaactcattgccctgagttataattaataggttaaagaacacttagataaatacaaagacttttgttgatgcatagctaatattagaatttgaaatgaaaggacatactctcaaataactagtgcttcacaaaagctgaacagaagctgcagctggggtagtgaggatcttctgcttggaagtgcccgagcacagactaggtttcactgttggggatggtgtaaagaagtttccagtactgggtgatttttcaactgcctccaagtgttcgagtctatgattagtgaccattctgtatgttcatggtttccttgctaaagagatgtaagtgagctggaaaaatataactataaaactttcttcaccatcatggtattccccatagcattgcttcagactgaggaactcacttagctgcagaataagtgcagcagtgggcccagcctcgtggacttcactagtcttaccatgttctccaccattctgaagcagctggcctgatggaacagtggaatgtccttttgaagactcagttatagcaccagctaggtggcagtacctcaggaggcatgggcaagattctctacatggctgaatatgctctgaatcactgtccactataaggtgctgtttctccaatagctaggattcatgagtccagggatcgaaggtggaaataggagtggcttcactcactatcacccccagtgacccacaagcaaaatttttgctttccgttctcatgaccctaggctctgatgaccgagaggtctcagttccaaagggaagaatgctttcaccaggagacacaaaaatggttcagttgaactggaaattaagactgtcacctggcccctttgagcttctcatgcctctgaatcaataggcagagaagtgagttaatactatgctgggtgaggtggctaatcctctctacagaggagaaattcaactgttactccacaatagaggtaagaaagaacatgcttgaattttaagagatcccttagtgtgtcactgcgtattaccataccttgtgattataatcaatggaaagctacaacaacccaatccaggaaggactactaatggctcagacccttcaggaatgcagatttgggtcattctaccaggggaagagccatgaccaagtaaggtgcttgctgaagggaaaaggaatacagaatgactagtggaagagggtagttatgaatatcagctacaagtgaccagttacagaaaaaagagtattgtaattgttatgaatagtcccccttattttgtttagaatgtgaatatgttttaggtatatttatatttgtatgtattaagaaaatatctttgattttcactctgattctttcgtcatgtaacagcggatgtattgacttaatatcatagttaagtattgttaattttcaatcatagtatttcagttacaagacataaaggagatgagtaaatttcaaagactctgcctcctcttctggggaaggggttagtgtgtttttagttgtatgcaggatagttatatcatgtttggtggaattatgaccttgttattgcctttattttgaggtaaagtctggcttaaggagatgtgtatgggtgacaagctgacagagttggacttgtgatgattaattttatgtgtcagtgtgactgggacatggggttcccagatatttgattaaacattgttctggatatatttgtgagggtgtttctgagtgagattagcatttgaattggtagactgagaaaagcagatggccagtgtttttagtcctcatccaatctgttggaggcctgaatggaacaaaaggcggagtaagagagaatttgctctctctgcctgacagcttgaattgggacatcagtcttctcctacccttggactatatataaaataatatatgtaaaatatataatatataaatatatagtacttatataaaatatacataaaatatataaaatataatatatattatatatatatatttggacttggactagaactacaccaccaactttctaccaccacttacatcatcagttctcctggtcttgggccttcaaacttggactggaactatgtcaccagctttccagggtctctagtttacaggccatagaccatgggacttctcagcctcatagtcatgtgaatcagttccttataatctctctctgtccatatatataatatataatatatttatatattttaatatatattttaattatatattttaatatgtatttatatatttataattataatatataatatatattatatttatatattttatagatgtaaatggtataagtcccagtccaagggtaggagaagactgatgtcccaattcaagctgtcaggcagagaaagcaaattctctcttactcctccttttgttccattcaggcctccaacagattggatgaggactaagaacactggccatctgctttcctcagtctaccaattcaaatgctaatctcactcagaaacaccctcacaaatatatccagaacaatgtttaatcaaatatctgggaaccccatgtcccagtcacattaacacataaaattaatcatcacaagttcaactctgtcaacttgtcacccatacacatctccataagccagactttacctcaaaatatgtatttatatataatatatatttatatttatatgtatatattatatataatatatatatttatatgtatatgttatatatacatatataatatatatttatatgtatatgttatatatacatataaatatatattatatatgtatgtgttatatatacatatatactatatatatttatatgtatgtgttatatatacatatataatatatatttatatgtatgtgttatatataaatatataatatatatatttatatgtatatattatatatacatagaatatataaatatatttatatttataaatatatatgtatatataatatataaatatatataatatattttacatgtaaataacatatttacatgtaaatatatatttttataattatatatttttatataaatatatatttatatgtgtgtgtatataagatatagatatctctcctatatatgcatatgggagatatacatatgtatatatatatctcctattagttctatgtctctggagatctctgactaatatagttgatcaattcttgcattcattcagcaataaacaaatatttactgaatgttttataagagagtgtatatgatttgctgtttaaatatttcaccaccaaacaaatggagaaatggtactcttgatgttcacattgcatgcctttgcttcttttttgaatttgaatttgcctattatgttttgtctgtttttgcctctgaggcaggaatattatggatctaccactgagccactgtgtggctttaagaaagtgatttaacttctttgtgattttattttctaagctgtaaaatgattataaaaggtccctaccttttgtaattgttattaatataaaataaacaatacttagaacagtgactgctaagcattaagtgctcaacaaatgatttctagtcttgttttcctcttcaataattttcaataattttattttagctgtgtttcttgtaattactatttagttcaatgttttaaaaacattgcaactaggatcttttgtcttttaatgaagtggtttaatctatttttatattttccataatgaagttgggtttagcttttttttttttttttcttgagacggagtgtcaccctgtcgcccaggctggagtgcagtggcctcgatctcgcctcactgcaacctccacctcctgggtttcagtgattctcctgcctcagcctcccaggtagctgggattacaggcacctgccaccacgcccagctaatttttgtatttttagtacagatgggttttcaccatgttgggcaggctggtctcaacatcctgacctcatgatctgcctgcctcagcctcccaaagtgctgggattacagttgtgagccactgtgcccggcccacatttagcatttttatctctgctttggggtgtatgtttatgtatttctctgttcaagtatttcctattccttcttttacatatgatgcttttcaaacaaaacatgatctggaagtatgtgcaaacttatgttgccttatttttttacactaataaatttaaaatttaactccaccccatccctaagcaacattgcttgattcttcctggtctccactgcttggcttttcccaattgtgcctttacatggattcttctcatagtcttttccattttggggacttctctttcatatgtgaggttactcactgtttgtgattcctttctattatataacatattagctgtaatttgtgctgctagacattctaaaaattgcaaccccctggccaatttcttaacagtttctgatatgaaatagatttccttcaatttttatatgcgttgggtcatttgaatgggaatttgagtaaggaatgtagggaaataggtaagctcttgcttacctattgccaatttgacctggaaacacactatggcatttttttttcaggaatattattccctttctttctatgtcctggtaacagcaaaggctgcaccaatattgtgctttatgtttttttagctggtaaaataagcaatccccgtgcttacaggattatgagagaaaagctgaacctttggattatcatagcctggtgtctccctttcattattagcatgtctttcataaagatgtgcagaagtcaatataggtgtgacttgacaaagaaaaagaaaaccaaactttgatttctttatgttaaatttgttatttagaaccagaatctggtttattttgatggtgggctccatgttgaaagaaagtataatgcaaaataaactccttttgttctttccctgtgatggaagctacacttctgtgtacatttcttcatcagaatctcttttacatctctatatccagggactcactgttctgctttccttattaaagcaaaaaagtagacataaactttcaaaaagtcttcaaaagaaaataaatgtaggaaagctatggtaacaagtatatggaattattttacaaactcatagagatgaagaagttgccccaaataaatgatcccacatttctgcctcctcttttctagttttgtttgtttgttttcccaaagcaacactctctcatgacacattacatgtgtcaacagagaattcgtttcatggaacgtgagtgttggaatattttatccctgaatccatcaagattactcaacatcaatgaaatctgaaacaagatcttagatcctggctgaaaacatgggcagattttcattctggcttctttactttcacatcttgctgccagatgtgcacaggtagccatagggtacccttcctttcaccctccaggcctggtccatacttatgaccacattcatcatgcttcatcttagaaaactgcacattctttgccaaaagggaaggtttgggaagagaagacaaatctctatccagtctctcttcattgtgatcattgacgtccctgtctgtctattctagtcatcagttggagagtgggccggagagaatattcagactggagaatgaaaaaacttctagttacccaagcaaaattgccatcctagtcaaatgacccctggcattttccagacctgatattttgcttccttgaagcaaaggccactgatttgccaacacttattttatgcatcctgactacactgatattgatgtgcattcagaacagaaacattcttaagtttttagggttagtccaatcacttatatttctaacccaagtctcccccaacccaccccataatttcattctctgcccggtgtagatatatctcccagactcctctctggaccattccccatgagtgcattcctcattgtaccatgtgctagtctttcttgaataatgtcaatttgatttgcacatgcctttttttttattactatgacatttacatgaagagagcctgtggtttctgaggccatcaggactagtagggttgcctttggtcttagttatattcttcacttcatttgactaaatttcaactgggttcttggctcatctaacttctgtggttgcatgaatataaacactatgaaggcttatccatgttttcttggctgattccctaaatacatacttgcctgaattcaccagttaatgctttgtcttggtattaattaaacttgatatgttatatccaaaatgaattgttctgcttacttttttccttttgagcaccatcatcatctctctctttcttgctctctctttaattctctggcttgttctttctttttaaaatatcttctggtttctttctctgtaaatctcatgaaatgcttaataatggtccattcataaactgcctagtctgcctcctaggtatgggtttgtgagactatctgcatttacagttgggtgacctaaggcaatagaagaagaaacaaatattcctcatttagttttggatgctttcttctgtgcctttgttgtaaagataatcaaatgagactgtaggaatagcaatatcttggtgcctgctgcccccactcccaaaaaaatctctgaaagggcaaataagatgctatttaatttcagtatcctctcagccattcataacagcatataaatgaagtaatctctcgtaaagagtatcctctgaatcaaccaagaaaaaaaggaagcatgatcgatttcaatgctaataaaagtttagagagttgtataacatctaaattcccttattctgtggtaagtaaacacagttcaatttcttcagacttacaatgaatgcttgacaataaggggtgtaatattattcatgagggtgatggagaggagtctatgaacaaggcagctggaagaggtctgtggaggatccatgtgtccccacacttccacctccactgcatgcctcagagatggtggcaagactcctttgtggcatgagtgtgaggttgacagagggccaggcatgttggtgcatacccataatcccagctacctaggaggctgagacggaaggatcacgaggccaggagttgggggatgcagtgcactccaaggatgatgcctgtgaatagccactgcactgcaacctgggcaacatagcaagaccttgtctctaaaaacaaacaaacaaacaaaaaacagagtacttcttaaatgggttcttattagccatcaggttttcttctgagagtctcatctatgttgtttgttttaatgtttataaatacctcatgaagtcagcaactaagattttctatgtgcatgcagcatacaggcatcacagctgggatagaaactaattgggttgattccataatccctaatccatattcctacattgtacatgggatctgtgtgttacaaagagagatgcttcatctcagttgaggttaattggatgttcttgtgccctataattacaagtgttattacaaaatgagagaggaggagaagagggaaaggtgaggaagggaggaagaaagagaaacagtgggtaaagagagagagagggaaagaatataatttattattaaataataacaataatctaattacccactgttgaaaatgtagattatattttgtggtagatattgcttaatcctttagcccaaaagaaaaacaaatatgcagccaaaatgcaacccaaacaaaagactacattagcctttttcccttccttctttttgctgtaacattttgttttaaggcagtaatgaatttctgatttgatttaattaaaaaatctgcttcatttctaaactaacactcaggtaagtgtcaaacttccaattatacacataaaaaatatgtttggaacctaagttaaaaactctatttgcattaggctttaatcatcataaaagaaaaatgtaaatgtttccaagaggtccagctacataaataatcatccgtttcttaagtgcacagtagagttttcccctaagaaaattctataactttgagagtaatgtaatggtaattaattaccagaaagagattaatattgcgtgccaagaatgataaagaaatgcacagaggccctataaacgcaatctgcaggacaaagagggaaatgtacaagcccatttaatttaaatttcaggcttatttcatgaaaagttacctcctcctttttaaaattagttatttcagttgaattcctattcaacgtcacctaaacacttgcaataacctttttattggccttcatatttctaatatggtatctcatctaaacttttgtcttaggaaatctatgtcttgttgttcccaatcatttcatcatgtctcagttgtcgtagttctctgctcaaaaatttccaatggcttcctattgctttcaggatacattccagtcttttaagaaagacttagagatttttcatcagtatgactttgaccaaatttgttctattcctacattgcttgctcctaagatgctcaccttttacctacctgttgtttcctaaatgtgaaggctaaaaaattattgggacagttatgagttaaaaatacagattcctaggcctctttcaaggaatcggattctccaggaaaaggaacttggaatctccattgtaacaagtgtcccatgtctttcaggcaggtttggaaactccatcctaagcaaaccccatcacttgccatcccctgaacatgagccacgcttccccttctctaccctctttgcttaccacaaaccattttcctcactgaaatcccactatcatgaacagttcaatcgtatgtgtcattagtatggtttctcaaaaagtagagcttacaacaagactttgaatgcgggcagtttatttgggaggtgatcatgggaaacaggaatggggaataagggaagtgagtcacggaagggaaacaagggccatatacacacactttatcaaggtattgctgttactaaggacagcttaatcctactggctcattgacagtctcctaaaaagactttctgtcttctagaaatgtctgtctgaagggtgaagcctgggcatgtattcacctgctcccgtcttcttctgtgtgggtgactcctggggcatcaaattccctgctcttctagcctagggatccttcagtgatgaagcagtctttggtgcaaaaagtggaaagaggcacagtgcatgttccagatgggactctgccagttagaggagggcctgagtgctcatggcaccattcaatgcagctgtagctaaagtcagaggggggcccagggatagaaactgggctgcaaacacattcacagcatgcctcctccatatatcacattagttaactattgtgtaacaaattaccccagtaacaaattaccccagtaacaaatcatgtggccccatttttcatgatgcgattatttgacattgcatgtctgtatcaaaacatctcatgtaccccataaatacgtatacctactatgtacccacaaattgttttaaaaaattaaaaacacaacataacaaaacaaatcatgtggctatatatatacctttcttactgtgaagcttctgtgggtcaagaattcaggtgtggcttagctggatcattcagctcaggggttcctacaaggtttaaattattttgaaggctttactggaaaaaatgtgtcctgtggactaaattttcatgtcccccctccaaatttacatgttgaagctcaaatccccaatatgatggtataggaggtgggatctttgggaggtagttaggttgagggtagagccctcatctatgagataagtgcctttgtaagaaaagacaggagagacggtggtctctttctcttccacgtgaggtcacaccaagaaggtggctatctgcaaatcagaaagggggccctcaccaggaacccaattggccagcgcttagatcttagacttgccagcctcaagaactgtgaaaaataaatttctgctgtttaaactgcccagtttatgatgttttgttatagaagcctgaactgactaagacaacgtgcttcctggcttactacgtggttgttgcaggattctgttccttgggagtaattggactgagggctccagttcatggctggctgttggccagaggcttccctgggttcctttccacatgagcctctccacggagcagttcataacatggcagcaggcttcatgagagtgctcctgcaggaggacgagtgagaatgagacagagacggctttttgtaacctgctctacgagtgacatccctttgcttctgctgtattctagctattaaaagagagtcactaggtcgagcccacactcaaggagagggaaccccacaagggctgaatactaggtggggaccattgggcaccatgtcgaaagctgtcccctgcaatggtcttttctaattttctcagggtgacttaactcctattttttcatacttttgtttgcagccctctggtagtatccttctcattcagctgcttcttatatgtattggtttatgtactttatccaaagacagaatagaataatgatgaaaactttggttctggagtcaaatgctagctctttcctgtgatatcttcgtgatattgggtaagttgtttagcctctctgagcctcagtctttgcacaggatataatatctgccgtgaggtttaagggagaccaagggcattcccatgcctggagctcactctgtgttcttataaatgtgagtccttgttattagaacctgctctttggtaacttccttgagggcaggagtcataatttcccaaatcttatagtcccctctgtgacccattatcagtatttgagaaatcatccatgaattaatgtcatgataaaacttcgtcaaatatcattttgctgttttccctgtcaaattttaaatgtggttttctctacatttgaaacttttgtaaatttaaggtagtatagagcacatggacagggaatttgaataaatcacttgacatctttctcaaagaaagctcttttaaaattaattcctatgaagtctagtcaagagacaataagtactaagaaaatataagatgctgttagcttgtaataaatttctcatgctatgtaggcatgaaaaacaatataaaccattgcagttatgagacttactcaaagcttgcagtgctgtcgtgttaaaccctttgtttatcaaaccatctccctgttacgtggtgaagagagcattggacttaaccactgaagtgctggatctgagtcgcataatttcttaaatcatctgtacctcagtttgtctcctattcaatgaggggccctaatttgaacctcagagagtttatcatatacatgggttccctacttatgatggttcaacttgtgattttcaactttacactggtgtaaaagcgacagggcattcagtatactccttggtttacaatggggctacgtgtggagaaacccattttaacctggaaatatagcaaaatctcacattttacttacaatatttgcattcacagtggatttatctggatgtaagtcagtcataattcaagtagtaccatctatactgattaagcacctactatgtgatatgctctgggaaacactagtgaaagtgcccacatagtgcctggcatacagttggcatgcaatagatgccaactgagcctatctgtggttctaagtagagggttatttatcattaaggggagcctctaaagatttgtctagcccagagtgggggattgggaaattgcatttataatttagatgacatttatataaggcagcttgaaaaatttccaagagtgggaaatgttgttgcaagagtttgttcttatttatagtttaaagaactagaaggagttggagttctgcgcctactatagagcatcagttattcaacatatattgatggagtccctcccacgttgcatatcctcgtccctggggatacttcgttgaatgagagaggcatggccctgacccagtggggcttgcagacagcagattcatgtggcgaaggggagtgccgtcacatggggccagagcagttgtgagcaataggtgagcaattgtgtttgtttgggtgaaagaagatgcagacatgtagcgggatgccggatgctcatgttcatagtgacacacttagctagcactagggggctgaggatagcatttgtggcagcactgaggtgtctttttctctgtcacagcacaggggctgacagcatatcctctgcaaacagcctgcctgggtttgattcatgccttcatcattaattccctgtgtgatcttggctatgttacttgatccctttgaacttcagtttcctcatctgaaatgtgacgataataatgagacttatttcatggggttattatgaggattgaaggaattgataatgtaaagtttctagagcaatctggcaaacagtattttgtaactgctaatgctgctgctgctgttgtattgtttttattgtagttgttattgcctctgttgctgttctgaccgatcctattattgttattctcaacagaagtagtaagcctcaaagtcctgtcgttcttgcccactactcttccctgctatgtcttattttcttgggtctccaggatatttcagcgttccttgatttatgatttttgtttaagaatcacctaggctgggcgtggtggttcatgcctgtaatcccaactctttgggaggccgaggcgggcagatcatgaggacaggagttcgagaccagcctggccaagatggtgaaaccccgtctctactaaaaataaaataatcagcctggcattgtggtgtgcacctgtagtcccagctactcgggaggtagaggcaggagaattgctagaactcaggaggctgaggttgtggtgagctgagattttgccactgcactccagcctgggtgacagagtgagactctgtctcaaaaaaaaaaaaatcacctagaaaattaaatccaaggtatttaaaaattatctggggtgtaagttaaaatgcagatttgtgggacccatttggttgagtcagttgatcctggggctcagacatttgtattttaataggtcttcaggcagaccacactttgagaaaactcttccttaagtgctataattgtgaaaaccaggatttacagcaactctactttgcttcagacacggggttaagagctttgtatatatctatatcatttataatcattcatatcatttataatcctcaaaacagctctgctgggtcaatattactatctccatttaatgatgaacaaactgaggctctgaaaatttagataccttacccaaagtcacaaagctagaaagttgcagagcccatctgtctcttaagcctgctcgttttctgctatgctgtgctctgctgcactgtgaggacctgctgtgtcccttttaacctgtcagtccccaatgcaaagtcatttggctgacctgagcaggctcacctctggcttaggctctgggttcagtgcaaccccaggctggggaaacacaagaacctccagatcttaagcataatagctgcacatgaaatcatccttaagagcctttttctgacttctagctctggttccaagagtagtacctttgctttgttcttgaagaccaaaatcttgcctcagaaataaccttgagagtgaccttgttctttacacctatttttcatttggcctcccattctctagttcctctgagataaaggccgtcttttataactcttattaatttcttcccaacactgatgagccaaccaaaggagtccagggtttgactctctgattttcaggcttaggctatgctggtgtaggtatagagtcccaaccaagccatggagaatgagttttcccaaaaataagaaggaaaaggagtacttggcaaacaaaagtaagacatgttcactttggtgagattttatagaggaggtaatagcagagtggcattttgaaagctaaaagtatcctagacaggctttggtattgagaaaggtaatggcagaggaggtagagagggtggcctgcctggaggattgaaaggagcttcttgacacagagcaaagtgcaggcagaaacacggtgcttggggtgattggagcagtcagaatgatcctgataatgaatgatatggcaagtagtgctcgggatttggtgaggagccactggaggattttaagcaccaatgggatatgatttctgctcattgagtacctagaatgtgcaagataggaatgctaatgctaagattttcatgacctggaaaaccagtatgacccgagagtgtgtgtgtgtgtgtgtgtgtgtgtgtgtactcatttgcacacaagggccagcatattccaccatagaaaactttcctttatagtttttacacacttcatggttcttttgaagttttactgccagagagagatatatggatgtaccaaaataaacttaaaagtcaaccaagtatttgaaagcaaaattaacttcttgctaatggttgaatcttttttataattttatcctaagtaattctctgcatgctttttcttgacaaggatatcatttaaagtcacagtggagtaaatgcaactaatacgtttctcattccctctcagtggcagatttttaatataagtgtcagtggataaatcttcaaaatccagcctaccacctctccagtcaattctctccacttctagagatggtgtcaggaacatcagcagaggaataagtgtatcacttttgatgtcctattaaaacaattttggcaactattaattgaatttcctggacgccaaggcccataccagacaataggagctctaagatgaattcagcatggatcatgcccatccaataagtgtgttgatgggtacatattcaaggtgtaagtttggggaaagagttgtgagtagagtgatggggcaatatgttgggctgggtacatgaagttagtttcatatgactgtagccttagtagtgagtaaatgcaagaagacatgaatgacaaatgtgttgaaaagctttataagctatgttaaaaacaggcatggattctatttattttatcctaagaacagtggtctgaagcctttgaaagattttaaacaagaggctaactctagatggcatcttagaagagatgctttgatggatagtgagtagggctaacattagcccactttgagcaactgataactgttttcaaaaaatgtggcctttcccctagggagatggtagaggctggcacctggattcacaaaacagagattggggtgggtagtctgggaggggggtgtttcgatatacaggcatggctggatagcagactctcctcctccttggcagacaaaactggcaaaatggccagccctgaagggtgtaatggggaatgcaagtaggaggccattgcactagtcctaggcaaggagtaatgaagtcctgaaccaggcagtcacatgtaggaaggaggagaagacaaatttaataaaatcagtggaacttggacttgcttgaatattggattgtgaggaaaataaaggtgcctacatttctgacttggttattttaagatgtcccataatatctccttatgagattacattatattaacattcaaaatagcatatggtttaaaatgtggaccaagatgcatgcacattgtttaatgatcattatttctgatgatttatgagaatcttttcagtccctctcaaatgactgctaacatacctctcaagcaaaatgagatttaattttattttattttcccctccatttgttgctggacaatattctgtctggaagccacaggtgtataatttctgagccctttatgatgccccacttcatggatgtcccacttcatggatgtccctgtgcctgtttcagcaatcatcagaacctctccttccctcacctgaattgcacacagtaacatggtttggatgtgtgtcccacccaaatctcatgttggattacaggaggggcctggtgggaggtgattggatcatgggtgcacacttcccccttgctgttaccagtgagtgagttctccctggatctgatggtttaaaagtgtgttacttccccttctgtctctctctctccctctctctctctgtctccccccccctctctctctctctctttcctgtcaccagatgaagaaggtgcttggttccccttcactttccgccatggttgtaagtttcctgagccttcccggtcatgctccctgttaagcctgtggaactgagtcaattaaacctctcctccataatttacctagtctcaggtagtccttcatagctgtgtgaaaaccaactaatacacacagtaaatgagctaaccctgtaaaggcagtatcccccctgtccaatatcgtaccgacaatgtttggcactaagagaaattcaccttgtgggtcagctcttcaccttagaaggggaaggtggacatgaaaaaggtcctgcagcaatagctacctccttttctagaaactgcctgtgtgtgttgccatgtggtggatcatttacctgcttttgcccatgccatttagttgctgaagacatttagtgaaaatgaaaaaaatatccggctactcagcacttcaagggcactaaattttaaccaatccaaccatataatttaataaaataccccaatggtcaattttcacacaaaattaacatatgtttctcaaggctctaatcacgtttcttgcccagcccaaatcttgaaaggctgctttattactttgctttcaatcttttatttttattttttttttaaccatgatacatatgtggacaaaagcaaaaaccagaataaaaatgtaaagaaaaaaaagaaattctttcccgaacaaaggttttctgaagtgtttcttcagagtgggtttttaaaaaatttctccaaggacaagaggccaacctcacaaaatagcaaataaatacatttttcccctctttgcatagttcctgaccttgaataaatgctgatcctttcagaaaatggatttgctgtggagttgagagggctataatgtgtcagttttacctcgagagccacctggattcttctcagagaagcacaggtcagaattctccttccctctacaagctggagaaggggaaaggaggaggagaaatgatgtgtttgaaagtgtgccaggaacagaaatagaaagcactacacaggaggagagatgtttcagggtcaccctcatgtcaagtacctttacctgtttttattttatttgtctgattgttagagtaggtagcacaagctgtgctcataccatgtcatcatgcctagtgggaacacaattccatctctagaagtggaggaaaagattgtgactgcttctgttttgtgatcattgtagttggcacttgccactgactagtcattttggttatacagggacacagaatgaaaaatgttcagtatgactaaatatctgtctagtctcctgtatcaacaattgcctcattctctttaaaattgccatttctggattttatttttattttctatcatttttatccgacatggtttccaaccatccaatggcctttgggttacatttcatggaactcctgggatgctccattgaccacacaccagacgacccttgctttaatgtttttagcactgtgccttcgcagtgtgataaaggaagatacgtttatggcatcttcattacctcaaattgcagcctatttgtcttattttaagtttaaatacaatataataacacaatggatttaaaatgaggaatgaaagctgaccactgacacaagccatagtttgtgaccttttgttatggataaacatatcttcattgaattgttgtgtcaattttctagtaacacagttagaacaaaagactggaggaggttgttttaatttcctgctcactgcctcttgcattaagaatgatgaatctaagtgaaaagtctggattaattcaatgaattacagccaagtatacttctcatgaaagtgagaatgtgttttactgagtgatgttttctaaggtcatactgtttattgtgttaccacatttatttaataatcaaattctgtgtgtgtgtgtctactgtgtgccaggcttgggcatattaatatcagaccaatgctgtattgtcaaacttaattcaatagacaattatgatggaatatcttattttcttatttaaaacaatagttctcatcagaatgtcacaaaaatcattgaataatacttgggaaataaattaagaaataagtgcaattaaatctcagtatttgtctctgtaagttgcagaagaaatttttaccaactttggagggtacttttacagtggattgcctttaaaatagtctaagggttatagacacaattcattgtgggtatgtgtattttagaaagttccacaaggaagctgccgtcctccagaaactgaagccaagaccaagacaagacaggctggtgcgttgtctggctagaaaaggcaggtcgtgcttatgaagagactgtagaaaaagaaaaactcaattttttttttttttgagatggattctccctctgtcgcccaggctggagtgcagtggtgcaatctctgcccactgcaacctccacctcccaggttcaagcgattctcctgcctcagcctcctgagtacctgggattacaggtgcgcacgtggcacccggctaatttttttttttttttgtatttttagtagagatggggtttcagcatattggtcaggctggtcttgaactcctgacctcgtgatctgcccaccttggcctcccaaagtgctgggattacaggcgtgagccaccgcgcgcagccagaatccctcacattttaaagaaacacattaattgtcatatgggtgttggattgcaacttgaagcattgactcatgtatgagctgcttcctatgtgagcaactctgtaagagctacccaagggtaaacagcagaaaagttttatttacagattaaacagtggcttttaattctcctaaggattaaatagcaatagccaggactggctggcgataatagataaggtggtacatttggcaaatgattcacttctgttgttgtaaattattgacaactcaagattctacttgtaactataactctgtcacaatttcccatctaacatgctttcttgagtgcataagggtaaaatttcaccaagtgtcccaagaatttagggcccttgagcatgcttcgaaaagtactttccatgtacttaactattgttctttatatgtgatgtgaagaaggtagtctgagacagaaggcaggctgtccaagttccttgctcctcaaagtgtggtcctgggacttcgggcagtattggtatcccaggagcttataacttaaagtataataataattaaaacagaaaaagaagaaatgcagaatctcggcgcctccccaaacccattaaattagagtctgcattttaacaagatccgtaggtgatttatatgcgcattagagtttaagaagcactggtcttgaaggcatttttctttttacactttgccttctatttgtcaatttcccaatgcagttatgatggcagtatagcaccacttcccctcacccccctccaaatcaaaatggttttcgaagcagaaatcatttagaccttgaaggagaaagtggggagggggaagaggttgcatttggaactcaatgttggataaccatgatttttaaaaatactacatttgtccatttaaaaattctaaacagccttgtctccagatgtcataattcaaacagatcgctttatctctttacctatattctagagaaatagatgtgtattttaaatgtatgtgtacctggcttccttaatgaaagttttactgaaaaaaaattttgttcctaattcatccttaagtgaagttttgcattcttaattttccactcaagtaatttagaaaccattagttaaagtggagctctaagataaagtaggatccttgtaagtttagatggtttcctctgaagattgctcttataattgtcagagaaagataaattcttaattgcatttcattacatctgggtcgcggatgtatgtttgctttccagatacctgtctggcaagagtgaaggagaatgggagattgagtgatatgctaacatcaagctaaaatactccagagttcatgactcgtgcaggtggcccctccaagtttctttcctcactaggaaaaaaacgtttttcctcatctatctgcatcttctttcttaagcagtcaagttaaaggcattctgtttctctgttgttcctcatactcatatggtttactatgtagctggatgagagaacgatggctgctctgaggttagagatttttgttgttgccttctgaaattggcaatcacagatggtgtcagcagtcaagtcagaaggaggtgccctttggttatttctcccctgaaaactggctctgccttgtggctcttttcaaatctcatctcaaaatctttttctcttgtgcctgaatggtttgatttctctttcaagttagaggtctcccagagaaaggctttgaagtacaatcagatccaaatttcaaaagtaaagagatgtgttttactgatctaaagaaaggaattgcatttgcagatactaatatttgcctagtgccctttccaaaatgtaagatttgcccgcatagataagtctaaatgtgttttgcagctgtaacttaatattgagtttataaaatacctttcaatatacagatcctatgtaagctgcttatatggaacatctgacatctgacttctctttttcaggttcataacaaatgttataaattcaaattagaaattctaccacaatttctagtcttatattttaaaaattactaaccagcttgatatgtctgagtgtattttatgtaattcaataccagagagttgtaacaagtaaaatttggactcaaaaattcaaatgaaggcgcttgcactatgagcaatatttttctggtaaatttctcttcttctgggaagggaattgaggttaaagtgatctacttatacctctcagtcaagagtattaacctttggatggtctgggaaagactgagtttgtatacatccttatgtgtgtattacatttattcccccgggcaaaaggcacaaaccttcattgggttgcaaaggggcccatgttaaaaatacttagcatttatggcttgaattattcgcaactcattattctctaggcccatttttaaaaaaatatttggggaccatacagaggtatgattttcatgttcctttttttttttctttatttcattctctgctccagctgggacaatatctgtttgatatataagtgtatagatttgagctttcaggagaaatatttcttcttcatgtgttttgtaaaccatactagttattgtgagctttatattgcctatattacctatgcctgtacatgtttaagtgtgttcacatacacatatatatacatatatacatgatatgcacataaacacctgcatgtattatagatggacatgttttatggataccttggtgtatataagtgttcttatatgtattttgtatgcatgtagtatatgttgtatgcatgcatgtgtttatatgcatatttatctgtgtatatgcatgcttatatgtagattcatatgcatgtatgtattcatatttgtatatatttctatatatgtacatgcatgtatacttattcaggtacgtatacatatatgtgtatatatagtatttgcattcacctgcttgtgtatgtttgtgtgcacatatacaggggtgtaaatatgtagatgtatgtgtctctatgccatatagatgctagtgtttttgcattcatgcttgtgtctgcgcttgttatttttcctttttaagtcggaaccttgcagttataaaccaagcataagggatgctgcagaaacataaggagggtgagccatggtgttcagaggaaagaactggcttccttctcctgagcaagactgaagagcgagccagggggaggaagccttggcacattctacctcagagcctttggcttccctaagactgaagttgcttagatgatccttccatcagcagctttccagttacatgtggctgaggtcaaaggattttttcttagtgattttaaagtgtgcatgcccagacggttttccctgtgttaatgagcaagtggaggccggtgtttcattatgaatatcccgttttgcttttgctgggccctgctttgagtaggagtagaaaataggaggattggcagtggctatggatacttggtcatcttttcttgctagagcatggtgttctattttccttgcccagacaatctcattactcagaaacattgagaaaacatgttattaagcagctgtgaaatgtgctgcttcttacattgggagcagaaaagaaaagcgcttgaagttctcttttccctaccagttggcttatggatgctgacaaaagagattggtcaattttctacattcttctttctaactcttcatcaatttaacaatttaaaagaaaacgtttcgtttttaattttgcacatcgagtatacaatggatgatttccctgttgtttaatgataatcctgttctcaaccattaaattgtgaacgacttcatttaatagcttgatcagttattcatgacattgtaaactaactctctgtaggctgggtgggactgtttttatttttctagtatatttgctttcgggtagtgttacaattgtatttattcatagttgatcagagacagataatgttttactgctatctaatctcccttaagctacagtaaaacttacatgcttatatttccaaataaagttttcaatcagttattctttcaaacaatacaatttgaggggtggagaattgagacagcgagtgatatctaaaatgtctaaataatagtcttactgtttcattcgataatattggaagaatacggcttctctatcctattacctctatggcttagttcaagatgagcataatttttaacggaaaaaacttcaaggacacaatgagtgggaacacttttggttttgagaataatctaaaaggcttgataaacagagcttcttgtatagagtctatgtttaggataattatttgctgtgttagtattattgtctattatttaagctgatgtaagttttcatagtgattctgaaaaaaataggcatagacttatttatatcattcaagaaacaatgataatgttgaaagccgtaataaccaatcacccattgcaaattctcttcttgtcccccagttgtgttgacagcatcaccgttatcctcattcccctagttaccatgacatcatctgccccttctcttcagagcccaagcccactctctcgttgagcacaacattaccttggctttggtgtgttgcctcccttgtccatgatgctagtttcatatttcataccactttacaaattgtagcatcctccttcttgtccatgtgctacgcttttctggtttcttttctccttatcaaccaccctgtaaaatattcagttgaaagtttttctaatgctccaaacttcaggccgctcccatgtgcagcaattgtaattggtgccatggagtcatctctaatcaattcaaatggacattcagccaagtgtctgccacatgccagggactatcctgggataggggaaataagcttatgagttatacttgatccctgtctatgggaagctctttgtctaaagaaggaagataagacagaagagacaccatgttacgatagaacatattaaagactacaggggaaggaactgaaaaagagctgtggcatattgggggaggtgcaaaccaactcagttgggtgcaatgagagaaggtttcacagaattagtaacagcagggatggatcttgaaggtgaatgacttaatacccacctttctgtgcctgccatgaatgtattttccaagagctggtgccatccttctgttattaccattctctattaataatgattaggtgactttttaataattaataatctaataaaaattatattaaataattattaaagagcatatgattattactaaagttatcacttgttaaacaattactaagacaaaccctttatgttcatttaaattttaagttctgggttgcaggtgcaggacatgcaggtttgttacataggtaaacgtgtgccacggtggtttgctgcacttatcaacccatcacctcggtattaagccgagcatgtattagcaatttttccttgcactctccctcccccaaccccatcccccatcccccgacaggccccagtgtgtgttgttcccctcctagtcttcatgtgttttcattgttcagctcccacttataagtgagaacatgcggtgtttggttttctgtttctgcattagtttgctgaggataatgggttccagctccatctatgtccctgcaaaggaggtgagctcattccttttttatggctgcaagaattccatggtgtatatgtaccacattttctttatccagtctatcattgatggcatgcatcatcttatttaatcttaacaagtctattttagagatgaacaaacagaggcatagagcaatcacctatagggaccactcagctagtaagaggcagagctaagccccaaatgaaggtctttgagactcctaagtccttgcttttaccagcatcctctgctgtacttcactcctgccctgtgttatggcccacacactgcagagcttaaatggccacatggtcttgaagacagaaaatgagcttggaaatcttgtgttttgttacataacttgctattactatctctaagcaatccacctaggctttctgaatctcaacttctgcatttttgaaataatagaaatagtatctggctctcagggtcattctaaaaatcagaagatgatgtatgaaaaagcatctaataaatgcaaaatattcagtcttttttcttgttctttttcttattactagtactaccagtaatacaactacaatggtaaaccacagttaataaaaaacatcagaaaagaatgaaactgttatctacaaataattaaggaattttggcttctacaggtcattgttttattgattcattattaatagtagtagataggctgggcgcagtggctcatgcctgtaatcccagcattttgggaggctgaggagggtggatcacctgaggtcaggagtttgagaccagcctggccaacatggtgaaccctgtctctactaaaaatataaaaattagctgggtgtggtggtgcatgcctgtagtcctagctacttgggaggctgaggcaggagaatcgcttgaacctgggaggcaaaggttgcagtgagcggatattggggccactgcattccagccttgcaaaagagcaagactctgtctctaaataaataaataaatagtagtagtagtagtagtagtggtagtagtagtagtagtagtagtagaagtagtagaagtagtagaagtggaagtagaagataatattcaaggacaactgtgctttgtgtggaaacctttggtcactaggtattttctgtcttttgtgtacatgtattctctttttcagacacaatggaattgtggatgttgcttgtactctttgctgaaaaataaaagcctatataagaataagtgggccaggaatgaaggccaattacatctgtttaatgtaaccctgggttcatatttaaagtgacaggatatatccagagctgataatcaaattaatcagtctattggcacatatgaaaaaataactgggtgtcaacgtgattagatttaaaggtactgcaaaatgttttctctggccacaaagccctaccgtcatgcccttttagaagaaacaaattgctaaggtcttttattgcaacctaaccatttcacattacagtataggaagggtgggccctctgttatgaagtttcatagatgacggatttaatttctgattgtgataggtatttatggatacttatatggaacctagaaaccattttttccagagattaccagaatagaattggatatgtaaattatatgctgaagtaaatgggaacagatataggttcatgacacacaggaaaacaaagctgcattagtttttaggcttaaaagtgggacacttcttaacttagaaatggcttggtttaatttcttccagtgcgctctgtagcatctggtaagagtcatttagtaaccattcaaagtcatttcatccaagtctccagggcaattgatttatgataagagagaaagagccttcctttttatttcttcagacttaattgattaaatatgttaattactctgcttaaacttttcctgtgatactgtatgtttgttaaggtggatcattggggcaattgtaaaaaaaaaaaaaaaaaaaaaaagcttcctgctaaaccaggataatgaatattgacattcttggcttttacaaccaatggaaatcacatttccaagtccccgtttccatgaggcttgcttaataaataacttccccaaccatctgtgttatggagatggactctcaggaagtatgaagtgaataaaatgtaaaagctgcttatagaatcacatcagcatctgtacagggtgagcctgtgactgggagtcgggagataaaagcagacctgactctggagtcattaactggaaatctcttccccctgctgggtctgccccattaaagtcaagaacattaccacgttaaatgtggccggagtccctgataaagagtctaattgaaagaggaacttttccagcaccttttcactttctacgatcccttcaacctttatcttagtttaacagaggggggaaaaacctgatgagatggtggcttgaagagaaagcggtttctctgttttttcaatgcctcttatgtaagcatagtcttctgctaatatacatctccaaaaactgagaagaaaaaaaatcctttaaaacacttaaaaaataaaatcacactcttccaaggaatattataagtttcaatctccaggctttgaagctctcctagggggcatttttctatgaaggtctttaagtaacgcctctttaaaacttattagctgtctctctctgacagttctagtttaccaatccatgattacttgtcaaatcttgtttttagtgttaacgtgcaaaatgatagcactttttttctttattatagctctcagctcaaataatccctctttatgatgaggttctgcatacccttaaaattttctaggatcccatagacttgtgggatttaagagccagagtggatcttagatatcaactttcatatatgtcaggtgaggaaactgaattcctaccttaagggattcacctaaacttctacttggctttggaatgattatgccaagtttagaactcagcttattcgactgccattctcttttggccaccacagaacggatagataggtggttcttctaaattcggaaaattaaaaaaagacatcacttgacagcttgctatagctctagttcatcaatgtctgcttttccacaattgttctgaaaacccagcatgaacagataagagtgtccccttgtgaaatgcccaggcacagaaggcgtttcacatttttctaggtgatacggtttggctgtgtccccacccaaattccatctggaattatagttctcataattcccatgtgttgtgggagggacttggtgggaaataattgaatcacgggggcgggtctttcccgtgctactctcatgatagtaagtctcatgtgatctgatggttttataaaggagagttcccctgcacacactcttgcctactgccgtgtaagacatgacattgctcctcattcaccttctgccatgaatgtgaagcctccccagccatgcagaactgtgaatcaactaaacctctttcctttataaattacccagttttgggtatgtctttattagcagcatgagaacaaactaatacactagacctcttgcattcctactgcattactatgaagtttactttttctcaataggaagcatagccattttatccaaattttcccctttgacctgaaaagaggacttggtatttgaaagtgttctaatactcttagcataggtgatcccactgcaaccccagtcacccttaggaattgaggatggcagtctccttacagactcggcaagtgatttctggctatcagaagaaaacttcctgagtccccgagaatgagtttactgtcataaaagtgcaagattgtagaacttcaatgaagatacttctgtctaactcctttcttttgcagacaaagaaaatggttgtatttgtcagggcttttgattggttacaactgatataaatctaactcagactcactaaaaaaaatgataaagaggaatttaagaacattaccagcttatgtaaatctacgtgatatgctgatagtttcaggggctcaagtgattccattcgtctcctctttccttcgctctccgattcctcttccttctcctatttcctctgtctgtctgtctgtctctctctttctccatattatcagtcatcctaaggtcagcttcaccttctgttggcctcaattaaatcagaacaacttggctcatattgacccaatctagctttgtcacattagaaatagagcacctgtacttggcactcttgggcttcctgcctcctttcaagctggaaggagttaggctagtggcctgtatcagtcaaggttctctagagggacagtatatatgaaagagaggttattggggagtattgactcacacaatcacaggatgaactctcgcaataggctgtctgcaagctgaggagcaagggagccagtccaagtcccaaaaccttgtaagtagggaagccgacagtgtagccttcagtctgtggccaaaaatccgagagcccctggcaaaccgctggtataggtaggtcgaagagtccaaaagctgaaaatcctggagtccagtgattgaggcaggaagtatccagcgtgggagaaagatggaggccagaagactcagccagtctaatccttccacatttccctgcctgcttttgtcctagctgcgctggcagctgattagatggtgcccaaccagattgagggtctcctagttctctgactcaaatgttaatctgctttgacaacactctcacagacacacccaggaacaatactttgcatccttcaatcaagctgagactcaatattaaccatcacatggcccacccaaaactcaagaattacaagaagagggaaaagagctgttttccccagaggaaaagtagggtgcagctgatatcagaactaggtggatgaatgcttggaagatgctaataatagcaacaaaaataagaatttaatatgtaacaactaccgaagtcttactatttgtcaggcacctttcaagtgtttaatatcttatgtttcatttaattctcgaaacatcaatataaggtagatatgaatactactttctttaagaggctgagtcacagaaagattgtctatgctcatgatttagaagccaagtgtatcttaaagtggaataatctttcagccaacattcgttcaactgatagttgttcagcaccaacttttctaggcactaggaagcaagacatttctgttcgtatcttttcggcatatataatctagggatgagagacaagacatcctatttccaggttctatgtctaaatgctgactatataatttgtagagataaatgctatcgagtatgtgtagagcctgaaggattgtgacatggaaataattattctcttttggttgtttaaatataaaaagaaagctcagtgaactgtattaaaatggctttgtctcaagaaaagttagtccaaaatgccagtcattgttcagcaaagaaggcctagttgttgtaaatattacatcttttcttctagttgaactggattttgctaagcctgggggtgggggcagaggatgaggggtgaaaattcttaaggagtatctgtcatggaatagataaataacaaactattttaattttaatggaaaaaaatttggactagtttgtgttttatttttttaattaaataaaaacaaacttcaaacaaagaaaacattaaggtttgctcatgataaactataaatgatatttcattgtttcagattggcaaaggtatatggaggacattttctttaaatttaaactagaacatttgaggtttaactcctgctccaaagacttcatttaaaaccttaatattagccctctctcaattaaagcatgtgaaccctttggttcattaacaagattcataaccatatgcttccatttttgtatccattggccacttcactccttttagctattcaaaaaaagttaatgtgcattaacagccaattgcacaaagtaattagtagataactccaaaatgagctttgattctaatcagaaaacctatagggtgctacttaacagatacctagcgatcaataaagtattggaaatcagaaacatggctgatgaatatctgaaaatcaaaataaaatgcatttgaaagatcttccacagcttggaaaatccagcttatccattttttaagtctctatcaaggtgtctgaataatgtctctaatgcagagcttaccctaactacacagacacagtttgtttgcagaaaagaaggccattagatatgactcagatactaaaagagatgccttcaaatttctggaaaaagctgactttgaaggccagtgaagtgtaatacacacgggcagttatattggggagtttacaaagcacatggaagtgatgttttaaccagaaatgggagtgaataatttagtggactctaggtccgctagattgcagtcatggcttccctaacttgtcattcttcataaacgattatactgtgtgtgtgtgcgtgtgtgtgtgtgtgtgtgtctgtgtgtctgtgcatgtgtttcccattatatccttcttaatgtacggctggagaggcagaataacctgaaataattccaggaaggtagcagtcattattcatttggctccatctgtcacactaattctgatcagatacgaaccctctgaatagacaccaggtgtcagaagtgaatgttttgtgtgtttgttttgcttttctcctctgcatcatatttgcagggttatgagtctaaagataatgcacaatggaattacagaaagatgttcctgtaagagaaatttagagcatgtttttaaaggattcagataacctcatatctaggaccccaaaatgtaacttttgcattctgaaacacaaagtggggacaagcaaggtctgcaagttctgaagttttttcctttgtttttctcatgaggcatgagaagaaataatatatgctttagtcctttttcttcttcatttgagccctggttctactgtgcaataaggatataatagaaataaaaaatgaattcagcagtcaaaaatccttaattatgactgtgcttctagaattacagtcaatatacaaatatttggacactcttctctgagaagtgtgtgcttctgaaatggagcatagctctatgagtctgtgtaggtcagaaacaaggccacattctcctccacatcctaagtacttagagcagggcctagcacactaaacaatatagcacaagctaaagttatatggcacttcttctgtgccatgcattgtgtaaagcatttaaatgtaggaattaattcactcattacagcagctgccaccttacagcagatgccctccccacaactgcccatttcaacccctggcacctgcaaacacttttctatccttatggtttctccagcactattggagcttgctgggccagatggagatgcaatcaagaattgtggtagatgtcatgttctggagagcaaccgtcaatcaatggagagatggaagatagtgggtaaatgacatagtctgcccagtttccagtaggatgactcgaaactgtgttctccatatttctcagagggtctctggggagttgataggctttggatgtttgcctcctcaaatctcatgtgaaatgtatccccagtgtggagggggcagatcctcataatggcttgggcccttccatggtaatagtgagtcttgctctgtagttcatagagagctgattgttaaaggagtctgcacctcctctctctcctttcttcctctctcaccatgtgacactcctatccctttgccttcttgcctgagtaaaagcttcctaaggcctcaccagaagccgagcgatgctgttgccatgcttgtagtctgcagaaccataacccaaataaacccagtttttataaattacccagcttcaggtattccttgatagcaacgcaaaatggattaacacctaaccacaggtgcccacagctggaacttgctccttgccttatgctttgttgacatttttcccttccctgatttgctttcttcactttcctcactctctcattgtgcttcctggaattatctcccaaataatcaatctgcacttacatcctttttatctcagggtctacttttggagataccaaaaatgaggcatttgtgcttatgttttcgtggcatgagtgaacaactgagtgaatgaatttcagaggtacctcacttccaggccaaccagaaactgttccgtttttcatagattcttccattaagctaacatgctcgggtcgtgatacagctgcagttgttaatgaagcagtagggagttacacttaagtggagacacagcaaagaataaattaaccgaatgcaaaacaatcattggaagggtctgggttaggttaacataatttgagtactattgaactcctggcgaacatcatctagagataccttgtagtcacacttctctatatattcatgttagcaagaattgaagcaattattcaaggcaaaatgtatgaaatgacagataattgagagaaaacaagacatagtcattgaaaagactatttctttgaattatcttaatgactcatgatttgcatatgttaacatttatttaccatttatttttggctttagccaatgagttcattgattttgtgtacacacacacacacattttgttgttgtgagaataactgtaaccccatttttttttctgctcctggaagtaaattgatgattccagcagttgttttgattctattcatatataaaaacaacaataacagccatcagcaataatgtaggctgactgataattatcatttattgaggatcttttacatgccaagtttatttcaactctttacatatagtgtctagtctaaaccctgaggagagattacaggtcctaattttaattacgagaaaactgaaattcagaaagaggtagggtaatgtgtccaagttcaaatgggaattagaattcctgtttatgtaattcttcagctaagtgttaagactgccactaataggaggagaacatagaaagtgttaggttcactggagagcatcaaccactcactggcactaagaacaggtaagaatccagagactgggcatggagctgatgactagcagtgggttcagaagaaagtagcaggacagtgttactgacctaattaaaaccctgatgtctgttcctttccctcacaacaaaatcaggtttcttgagttggctcctaagtcctgctgacctctggcattcacttctctgggatgatcccatgctatcttcatgggtaacaacataaagaaacaactggtttgccctgtaaagctgttataaacattttcttattcttgtactaatttgattattcatttttctccttaatctactgatatttgtaccttatgtttagcttgtgcagaagtatttaacacagaaattaggtgatggttgggtagattcagttactgctcaggtcagtcattttccataggtacgatgtcccaaggaggttttaactcaatctcccaatacatttggtcaccaatatcagcagtccatgtgaatttctcacagtttcccagatagcatttttcacctctggaagcctccttttccatcccattcttcttttctttgccaacccaggtctccagttagatgtcattttccctagataagatctctatctcaactcctccattcttcctgcccctcagctgggcttaagttactaatctatgtgtttccatagctcactgatttccctgggatataaatggatggttattccaatgaaaaaataaaccttttcttctcctctcacatattagtcaagacaacacctctgacaccagacgtgtgggattttttttccccacacaaaaaataatttttgacaggacccaccaacttggtgccctacaactttacccaattctgatactatctacctggaggtagtgtcagatcccacaggtagagggctcagtcccacaaaattactcctctccccatccctgccatctcagatgctaatcataagtccctaggttataacctgtacttgtgaccaactggcttgggggtgcctatgacccctttattcggtttgattgatttgctaggacagctcacagaactcagggtaacacatttactggtttaatgtatgcttaaaggttataaagtttacagatgaagagatgcataggacaaggccagaaagaatcccaaggacaacagcttccagcccgtggagttgggttgtaccaccctcccagcatgcaattgggttgccaacccagaggctctgtaagccccatagttcagagatttttatggacggtttttcatgtaggcatgattgaacaatagtaactcaatctctagcccctctttccttcctggaggatagagtagatgaggacctgaaagtcccaagcttctaattatggcttggtctttgtggtgaccagcttcctccccattcccccatccaagagcccaccaccaattgcttcagtagaacaaaagacactcctatcaacgagaaaattcgaagggatttagaagtgtcagatgttcctgtcactcagaaaattacaagttttaagagctctgtgtcaggaactggggtcagagaccaatatctgtatttgttatcgtttcaaagaccctgttctctggccacaaaccacttacagcaaatgctcatatctgtctgagcattgacatttgatgtagcatttgtacaacagataaagcatagtaccaacacaaatatgcctaacattttgagaagccagagaggggtaggggtaaatttaaagaaacaactagtttgccctgtgaaaccattatacatttttttgttcttgcactaatttgattattcatttttctccttaatctactgatatttgtaccttatgtttagcttgtgcagagctgtttaacatagaaagtgatggttagctagattatctggcctgcattatctaacctgctcaggccagtcattttccatagctatgatgtcccaaggaggttttaactctatctcccaatacatttgtttatcgatatcagtattatcataagacttctttacatacagtagttgaatcttaccagcatagggcagttttgttgcaaaacaaagagtaagaattacacaggtgtttggtttgacttcccaacagaatctacctttgtccatattccagatagtcttaaagacagtcatcattacaagtggccatgacttggttatttctgggttccaagttaattgggaacaagattaatcaccctgtctcatctcacatgcctgtactaaggctggttcccattatctgttattatactgcaggacctgcctccctcccacagggagaaccggagtttatctttcactaggcagtgagcttcatgaagacagactactgtgctcccaagctagcagaggatttagcagatagtaaactctcaataagtgtttattgagtaaatatatgaatgagtctaatgagaaaattaagtaggtagaatagcaggtcctgttgagaggaggtcactggtggaagtcctggccagccagtggagagtgccagttctaaaaactggtaatgctgaaggaaactgcctatccatggaaagaatgacgagggtctaacagtttccttcaaaccccaaaaaccagtttctgctctgttttttttaacatacagggaagaaacacatgacccaaagctggacaatccactctatggtcaatgaccaaccaggtacccctgttaaagaatctgagctaaaagatattgcattagtatttaagaaagtgagagtgagttgaattgaaaagatgcagtggcttgtgctgtgggactgcgcagaaccacgtacaaggcctacacagaggcgtgggtaaagacaccaatggaatagatccgtgaacaggagcagaggtgagaaatattgtgcaagctctagaaaatggagaagttagcacaaactttcattattccatttctatggtgagaccactgtattttagttattttgctgtatagtcatcaaattgttttgtacttacaatgaccacatgactaccagaacttgctcaaggggatttatattggttgcaatcaaaagacacttaattagaatggcccctattctaaatgaacttgtccactggactaggggctctggccaagggaaataagataagggctcactttttgttatgaagcaggaaactggaaatgagattcaaagtcaggtgagtgctaagggtgatttgatgatgatttagggcagaaacagagacaaaacaagcagagtgcctacagaacaacatgtcagaagattccactctcaggggttgaccctgtgccatccctgcactcgtaaaatcctgagagtgaacaccaccaattgccctaggtgcctcaccctagtctcatgcctacttatttacttatgaattcaacaggtagacattaaactcccgttatatattaggcgatgttagacaatgaggagagatactcttggccttgatctcttggagaacttaaagtctaaagaggaagataaacagaaaaaagccagcaaaaaccgtgatttgtactataaagaaaacaaggaggaaacagagggagaataacccctggttggagaaggtgggcattttgataaggaattttgggaattttctctgaggaggtaacgtctaaatgtagcttagaagaattagaagtgggtagggcctaggagatattctaagcaaagactacagatattcaaaggcctaaggcagatagaactttgcccaagttatgagtgagctaagatcagagtgtggctggtgtaggggaagggagaaagtcagcgggcatggatcatgcaggaccttggatgccacgttagggagtttacatttgattttaaggccactggaggtattaagtatagaaatgatacaatgacttttttgtgaaaaataaataataataaagctgatatggctatgagtggggaatggcttgaattgatggaagattatgacagtagctaggtcaataatgaggttggcttgaacttgggtgatactggtggatatgtgaaacacttattttaatgagattagatttatttttatgagctaactgcatttgctgatggattggatatgagctgagggaatcaaggatactcctagtttttggtcttcaataactggactccggatggagccatttactgaaattcatgtatttattaagagcatactgggccatgcacggtgactcacacttgtaatcccagcactttgggaggctgaagcaggaggattgcttgagcccaggagttcgagagcaggctgggcaacatttttgagggcttttctgtacttaaaaatacataaataactaaattagccaggtgtggtggcacaggcctatagtcctagatacttgggaggctgaagtgggaggatccctggagccctgcagttagtcatgattctgcaactgcactccagcctgggtgacacagccagactctgtctcaaaaaaataataattaaaaaatgtgtgtattgaaccttcagtatgtgatgggtcttgttctgaactttcattatatagctgagagttaagcatatacagtcctgaccctactgagttttgttcttgatggggagatagacacttaaatacatacaatatgtagcaaattcagtggtgataggagcagtgaagacaaacaaaccagagaaagaatatagggaaatgaaggtggtggcaatttttttaaaaaggttttaagtaaagatttcactgtgaagatgacatttgagcaaagatcacaggggctgagagagtgagatgggggaaggaagagctcttattccaatgttattgaaattgtcccttagggacaggatggggcctgcagctagaatctggctgtcctgagggatagtggcttgtcattagaaaattcatcttcagcctgtaaatagggggcatgtaaataagtttctgaggtttacccttaatctatggaataaagcaaatttgcaggcattttctgataaccatgaaagctttagtcagaatttgaactagtggctctagggacttgcaatatcattaagtcagatttaagtctccttaagccacatgcttaatccattaagtccagtctttagtttgctaagctacctttctgtgcctgcttagggaaattatgtctgtttgctcccaaaggttttcttgaaggcaaagccaaatggaagtcagatgccattgcaacctgctgcagaaagagcaggaattctgtgtttctgctggcatttattgtgacaaagacttgatggaagtggtgattgcctggagtgagatttggtgcatattgttgttacattcatactataatgtagagcttataatgttcattggatatggattggagggaaaaggaagaatcaaaaatacttttagtttttggtctttggaaatcttcattcaaccggcacacaaactcttctcccccaagactcgaggcattttttaattaaattttttgactaatatgtggtgttcatacatttgtatggtagtatagggaagtatcacaaactcaaaccctttcaggggatcctgcagttaacatatgtgaatgaaacagctatattaaaatgtatccatcgtcttttaaacacaatggcatcattctttaagcacatcatcttaagcacagtgccctcttcccctgacaacgaaagcttgcttgtcaattttgggctacagaccctaaatttctgggtttgattccttacacttttggttctttattaactatgtgacctcgagctttcctaagtcttagtttcttcatctgtgaagcagagatgatagtttctttctcatagtgtcattgcataggttcaatgagatggggtttgccaaatgcttagcacaggccctggtcaatgataggcacttcataaatggtgaacttttattattttcatcagtgttcatattgattattgtactacatgtatatttttaaattttctgtatattatgatttttttgacatcttagaaaacatttctggttagggagaggctacctgcctagggctggccaattcttagagacagcaactctcagccaggaacatatctttgataggtgaactaatcaattcagatgctttgtacatcccaggaggcaatattccttgccttagtaatgccagggagaagtaccaacaactagggatgacccctataccttagagaccagaaatattattcaaaccagctgatccgaagctttatcctaccccatcctgcctttcccacagaaacccccatggaggctctggccatcggcttcccccttgctcctctcttctgcctccctagtgtctttcccatgtggtccatcaaggtgtgcgatgcttcctgtctctaggacctgtgaatatagtgaaatttgttttcctgagcctctcctgtcttacctcttgcactgcacctgaccaacaatcatataaaacaatacaaaacaacaattcaccaagttctaaaggaaaaatttgtgcttcaatgagaattgttcattatccagagtacatccttttgggttatctgattctgattctgtgggcgctattctacaattctgtaagttgtggataactgttagaaatgcaaaataatacttgtctatagacatgtaaataaatcctgctcttctttcccaaaaaaaaagctagttttgctgctcatttgaatattcattttaatactttatacatatttgtgcttttttgacttctccatggatctgggttacaacatttgcctggtttccttatttaatcaatgaatattgaataaaatctttaatgtgggttaatgttatatctgtatgagattcataattttacctggttttgaagcttttaatggcacagaataccattcaaaggactgtgaataaggaaaaagaactttaaatacctgattgagatgtagatatgcttagatatggaaagtgaaattccagtaatagattctgtatgattaagttctaaaacgaatggaaacaaaatgtgaggctaaggaacagctctgctctggtgtcaatagggtgtatttcactgaaggtgttattgggtagatagcgttatagggatttctttcttacctcatcaatttgtgaaaataaatgaaggcccctgcctccaatgagaacaattattcagagcttgctatttacagcaagggaatcagctatcatcacttgtgttttggcagagactcaaaggcaggcagagaaatgggtcaggtgtataatggagtaagggaaagaccctgatgcaagtatgtttgcaagggaacccacttgtaggcagcctaattagtagcttacatgattggttagtggtacatgtttggctttctctggttgatcacaagttgaaagcaggggtgaatactgggattttttttttggttatttatcaagtcttggccattttggattaattgtttggcttcttgagctggttggtacacataagtctgacttcctgggctggttactatagatagtaggttggtttcctgagctaattgttgctggttgtgggtcagagttccatttttatagacagtctggccagtattcccctgtatattcagtctcttcacttcagggtactaatagtactctgtcattgaatagaaggaaaaatatttattattcatagcataattcttcccaggatgaacctataatattcacagcactttacatgttcagagcaagtgtgtctctatgtccccagcaatggctgtatcttattaatcttgccattctttatcacaaagggccaaaaatatattagggacacagtatgtatttattgagtcaatgaaggaaatatgtatattaaattctctggtagaagaaaaacactttactaatctggactcagttgtgagtgatacaaacacaacttaaaatgggttaaaagggtaacttgtgagcacacagaacttaagaaaactccagactcagttctatttaggggattgcatcatttcatcaagctttagtttctctcccctctctctacaatttcctctgcatctcatcattcttctttgctctagggtaatttattatcaagtattgtctagcttgtggcagcaagatacttgccttgtctccaaaacttctgctcttaatcgctacattatactgttattctacttggggctccatacgtttttgtggaagaaagaacacaggtaatgagaaaaagaaagaaagagagaaagagagagagagaaagaaagaaagaaagggaaaatgagatggaaggaggccggctggaaaaaaagagaaaaatattcaggttaaattttctaatagatgcatcatacacagggtagtatatttatggaaaactgctcccaaattcaggttgcaagtgagtgctaaggtgactttaaaaaaattattatttttattttgtaaagacttgtacctataggtagaacttttcattaaggactattcattggtgcctcagtgagaaaattataaacgtggtctaaaagcgttaatcttttacttgattggttgtcatgctgagattctaggattagctttgaatctaatggctctagtgggaagttctgatctctctattattttttaattgttttatttcattttatttcatgaaaaagaggttttccttttttgcaaaaactgcaccgaggtgaagcaaagctctagttggggcaggtgtgttatgtagggttagtaggactgctcttgctgtgcactcattggacagtagcacaaccccaaggaaaggatggtgacttctctgtttaatttggacaatgcagtaggacagcatctgagaagatctccagagcagggctacacgggcacctgaagagcaaacattcttcccaaggcttcaaaggccaataaaggcttgttttcaagccctcctaatctttagcaattccaaatcatttcctcccctattacaaatgcttgcctacaatatcctttggtgaataatagtgcaattcaaatgacatctaatcagaacatcgttttcataattgatctgatatttgcagtgccttttcttaatctttgaggatgttttgtagcagggactctgcctatctgtttgaattaaataggagaaatggaagtatcagctcttagataacaatggatttaaaatcagaaagtagatataatgcaaatgatggcttatttttaatttgtgcctctgagaaaaagatttttatcatggtgcaaacaaaacttgcataagttatgaaatgcattatttaaaactagcttgttttctcttaatgaattacaaacatgtgtatttgcttatgatatttagcctgaaaagttttaaacaggagttgtacattgtttttcctccttctttaatgttccagtgaagattctcatggcatgcacacaggaacgtgtggaagtttggttgtgatctgcattttgttttaattaatttttccttttatctaggaagtggcagacattttaaccctcatttattttctgagtgattgatagagatgccagtgtttttcatttattattctttattcccctctgtgatattgcagatgaaaagatgagactcaggaccgctctgagacattggctacaacagggacacatcattgatggtaggaagatggtaaacccacttccagtgccctgatcttgtttctctgttgttctcttccatgtttaacgatgccagaagggagatgattttggcttacttagaagaaagacaggaaagaatgaagtcaggcaaacacacacacacacacacacacacacacgcacacgagttaggtagagcaagacagaagaagaaaaacagagaaacagaaaaatagcaagagaaaaggaaaggagaggtgaggggaaagggaaaagagagaaagaaatgagaaaggcatgagaggtgtagagcaacagagagggagagggagaacgtgagaaagggagtgagctggggagagccaagaagagaaggaggaggaggagcatatacttagagaggatacagagagagacccacacacacaaaggaaaagtgggagcttttgtgaggcaactcaggcctcgagaaaggctttgataatctcttctgaagaaaataaacccagctgttcattaaaaatcaaaaccaaaacaaaacaagacaaaaacctgtatacctctgacggtctctgagcattataaatgttgacatacacctactgtgtatggatttttagggacaggtattagcgagagtgaacaggggactgctatggcttcagcagctggcagttcccacatcttgagaacaccctcccccaacacctctcttgttacctctttattttggaaggctgatctgatgtccctcatcttatatctatcttccagttcctcagctgaaatcttagctggttgagggttggcctgtgacctcagcctctctgagtgtcacctctgccatttgaaagaatagtgatgttggcattccacattgcatatgggaggagtcaatgaagcaccgagtatgcctagctcatggctttagacacagaacaattattgctcaatgaatgttgatttctttctccaacttgcctatctctccaccatctcctccttcttcatagacttctctctcatgtaaatgtgctgtaatagttagcacagttgtagaatcttaatgattttgaatcacagggggctaatgttccaaaagcttaatattaatcttaaagcatcttattttcaaagagatttgggctaaagggcagacagctttggagtctgcctccttccttatctaacaatttcccctctgtagcttcaaatggccctatgtttggtaatgattccctgtttatattttgtttattcctgttacccccaactaattgatgttgattatctcccccgtgtcctcttataataactcagtcctaattctatgtaaagtttagaaaattgaggatcttaaggcacactctgaacttattcataaaaggagaaagagatgaagtccccagataacagtggccctttctgttgtcatagagaggagctgggataagctattgaaatagtgaggcttagataatccctgggaagtgctctgtcaagtcaggtttcagtcagtttccagatgttgcctaatccagtaacttgcttagtgccaaattattgctataatctcccagtcttcttgctgtctccatatactttgtgttatttcaaaaccctcataagatactgcaaacaggataatgagctctggtgctgattgcctgatcatatacagctttatttattgattagtttctgtgttatatctcccccaacccaatttatcaactcttggtgagtagacaccacttgttttttttatcactcctgaattttccacagagcctagcaggttttgatggacatatgaaggattcagtagtaactgttgattgacagctgatcacatccctacttcaaggtccagaagcaacacatatgcaaatggattgtgatgcagttcctgtacctttcaaaacaattcttgtaccatagacaaggcttttatgattggagttcttttaaaatagtgtaattctcaccttgcctttcaaggctttcatgacaaacctattatcttttcatgcatctacattcaggatacataataaaaaattggaggaaagcagtgagatttttgtttcaaccttgtatttgttatgtgttttagaaaatgaagtgtaaatatctacagactaaaggttgattccaaaattccaaggttggttcctagcactgttagggaggcattcatgtcttgtcttgttcattcaggtgatttttcaaggatattaaacttgaaacagtctctctgaagtcacagttatctgagctatttgaaaggaattgatatgagcatgttagggagggcaaggtcttcattgtgcagcctgactctgtgtaatgaaaaatcaaatttgaatattaagaaaattaattcagctgtggcagaaaacggaacttgctactcctcagctgtggcgtactgcaatgcatagtgataagactggcgataaaaaatattctctatcctgactgggtaattcttgtgttgataaatagagactttggagaagcaatacttgtctaaccattcttaatacacaatgcgtctgatccgatcctgtctaaataaacactgggtgcatgactggtggtgtcccaatcagctttgtttatgcagccgagtcaacttaggatatgcactgattcagaaattgaattttacagcctgccttttatactttgccacatggcagtgacaaagatcagggatgattttttttccataaggagaatacctcagctgggttaagccattataataaatatagcaatttgagatgaatgagaaaatcagagttaatgaggcttggaatcatgtgaagaaaatgcaatcacttttgtggtaggaaacacaaacacgcatacagacaaactcttataacctggcctacttttacttttttgattcaccatcaaaagataaaatgacactgtacactcagtaatattcaattcacacagtcctgatgtttccagttttattcatgtctaagtaatggagaggctaatgttgtagttctgttgctaacaatatcagttatttttgaaacatacaattggcttacaatgctcttttaactaaaaatacatagttgtgacatcaacataaaatatctaccatcagagaagtaccctttagaaatatccatataaatgtccacatccttttacaaatcggaattccaagacagggtaaaaagttgaactatgggctgggcgcggtggctcatgcctgtaatcccagcactttgggaggccgagacaggcagatcacgaggtcaggagatcgagaccatgctggctaacacggtgaaatcccgtctctactaaaaatacaaaaaattagccaggcgcagtggcaggcacctgtagtcccagctactcgggaggctgaggcaggagaaaggcttgaacccaggaggcggagtttgcagtgagccgagactgtgccactgcactccagcctgggcgacagagcaacactctgtctcaaaaaaaaaaaaaaaaagttgaactatgaagaaagaaactaataatccattttgttcactttgcactagcacaacaaaaatactggtttgatttaaaatttcagtaaattgacttgttgatatcatgtacaattttagtgctggtgcatgctaagaactatattccagaaaactgctggatctattctgttatatgtacattctgtggttatttcaacacttttggaggtctcctcagttgttacattgcaattgttgtaattgtttaggtgttttaccagcatctgtaaaggggtcattgctttgattacatctacaacatacctgtaaagggagtgacttcaatgtcagcacttatggatggttaattctgtcattttgaaagagggtactgtcttagtccatttgtgctatcacaaaatgccttacctagactgtgtgatttatgaagaagggaaatttgttactgttctacaggctggaaagtccaaaaccaaggcactaacattggcgtctggcgagggtcactctctgcttccaagatggtgccattattgtgtccttaaatggctgaaggtgaaaaagcaagagagtgttccctttaatcccagaccctttttataaggatgttaatcccattcatgagggcagagcctcgtgacttaatcaacttccaaaggacacacctttttgtactgttgcattggggattgtttcaacataaattttagatgagataccatcatttaaaccaaagcaggtatctagtaacatttttcaaaatcacagatttaaaatttttagcagatgagattaggcacatatggatagagtttcagagttagatgggtgatctctaggaagcctgggtcctcttgctaaaatcattctaaaggatcattttctcaaaaggttttttcaggaggctgaaactctgtgtgattctacacagcccagagatgtgaagagtggaagacaacaatggaacaatgaatgggaaactgtcataaatagataatatatatttttacatgagagcacatatttagtcttctatttcaagattaaattctcaatcacatcactgttgacattttgggccagatcatcctttgttgtggggctgtcccgtgcattgtagaatgttgtgcagcaacatcccatgcctctttccattagctgctggtagcaggcccctcctcacagaccgtgacaactaaaaatgtctccaccttttcacatgttctctgtgtggcaaaatcctcccactaccctcgataagaaccattgcactgtgacgtcagtaagtgtaattataaagatgtacccagaagcaatgcataaaaatttagcatacacccttttctcccacactacattgatgtagtatttggtgatcagtgctcagttttctcagttcaatctattcaggcatctagggaccatacatgaaaatttcaaccacttaattaatgtaccaatacactaacagataattaggaaaaggggaggatgtggattgactgggagagagaaattaaccgtgccttccaaaatattttgcagaagaaaactgtgatggtagattggaattttaagattagaaaagtctctaatatcctataacataattagttaggatggataaatcaaaaccaaaaccaaaagcaaaaagaacatgaagaaaaatcaaagcaatctgacaggtttaagcgtctatttacttatctccaccttgaagaataaataccagggttttgtgtctaaagttccacttaaaggaaattatgaaggatggcccttcaggagggtttgggacagataaatctggggggaaaaggtgggtcgaagaactttgaaatcaaggtgtcttgggcctgggcatggtggctcacacctgtaatcccagcactctgggagaccggggtagatggatcatctgagcccaggagttcatgatcagcctgaccaacatagtgaaatcccatctctactaaaaatatacaaaaaattagtcgggcatagtggcacatgcctgtagtcctagctactcgggaggctgaggcaggagaattgcttgaaaccgggaggtggaggttgcagtgagccaagaccataccactgcactccagactgggcgactgagtgagactctctcaaaaaatcaatcagtcaattaatctaacaatcaaggtgtgttgagaaaattttatgtgactgaggaccaagaaaggctggaggaagttagctgctgttctgtgttataggtcttatgtccaaaagtgtgctagtaaatgtttaacaactggttctatgttaagtctcgaaatcgacgagacaataaatcacgacctgatttggagtatttgccagtttccatggtgtaaatactctcaccatcactgacttcaagccaccaacgtaacagcactaaatgttgggttgagaagaaatgtgatgtgaactccaccatatagtattcccatcgtgcagataaaataagcataaataaacacagtgcaataatcataaaatctagtaaaaataattaggaaatgagtattgcatatttattatattttttattattatttaattataagtttacattatttaatttgggataatagatgtttttaacaaccaacttgcaaaataccagaaaatttaacagtcagttcttgcaagtttgagcaaaccagcttccagctcactcctgctcaggctcccatcctgtacagtgtcccacggacttctaaggacctccatgggaaatgtctgggtggtaccttcacatttagatcaaaactcttttttaatgaaagagccccactaacaactgagaagggtggtggagccccagtaactctgacactgaaatatgtaccagcccaaccaggagatgctttggatttagactaaattctgtttggaaaaataaaaatgtgtccttttttatagcaagtctactagaatagaattcatacccacagaactcaccacagtgttgtaggatgagaacagccagtgaatgcaaacctgtgctctgaaaaagggagcagagtgtctcagaactttaaacaattcaactgaggcttcaggttcctctatccttctctaaacgatttcagctaagttgactgtaaaaagggttcattagagttgtaatcttgtttttatgccctgcatatacctgccagcccataaaggagaagaaaactctaaagccacaatgaaatacaattcattaggagagtaacagatagaggaaagggggaaatgtaaagggaaaaggttattattactttttagtaggatatggttctcttaaatctaggcagatagactgaatcacactgacgtatttattttccctcccacatttcacatttttctagttaaaatgtcacaatttttcttaaagaatatcagttatcacagtgtatcaggcctttaaatataactattaatagataatattcaaataggacttctggtgttataaaaattttctatgactcttgggaccctgctatttctactgaaagttagcactgttctacagaggtcactttttcatttacctataaatggcttgccgttctactaatgcataccttagaattcaggtacaattttataataaaatcaacgaagcataacgtacatggaaaatcataacataatgctaaaacaagttgcaagatcaattgatatagttatttattaccaaaagccccagattatttctttaaatcacagttggctaattggatttaacactaaagattgttttttttaattatttttcaaactagcatgtaaacatacctgaagtgaatccaaggacaaatccaacaccttaatgttaatgatatagttttgcacaatttagacataggctgttgaatagtttatcttgatggcatatagtcaaaacctgatctacacaatgcaatactatccagacctagagggatttaaaaaaatcatattttaagtcatttattttaaaaaattttttttatttgggaataattctagatgtgcaaaaacattttacaaatagagttccagcttcccctaaagttaatatcttacatagctgttgtaactttgttgaaattgagagatgaattctggtaccttgttatctactaaactctagattctatgttaactctttattctgattctgctaattttctattaatgtcctttttgctgtcctaggattcaatccaggataccacactgcatttaattatcatgtctcttcactcttctttggtctgggcagttttttagactttccttgttttccattaccttgatcgttttggggagtatcagtcaggtattttgaagagtgtccctcaatttgggtttctctgatatttctcaaatgtcagactagggttgtgatatttgggaatgaattctgaattccacagaggtgaagtgtgcttaccacattatgtcatgaatacgggatatcaacatgacttatcactggtgatgttgaccttgatcacttggtgtgctgcgtttgtctgatgtaaagttcctattttttccatttccatactctgttctttggaagtggctcactaagtccagtccacacttgaagtgatgatggtggtgatgacaggactgaattaaacttaatctctgaggggtaggggtaatatattcatattgtttagaatccttccctaagaaaatttgtctcttctccttctggaggaggtttaaaagtaagatttcacagagtcagctgtgaactggttaaaaattactaagtccacacatagtacataaatgattcacaatttacacatgtaattcattttagaagttacagactatgaaaaatacagcaagtgggacataaatttccagatacttccatcctacctgctgcaccccagaatgtaccccagtatgtttatttagaaatcatatgtatgcattatggaactaacatagtatgtatacagagggaaaactaaatttaaataatatgctcagagtctcaatataaataggataatagtaatcactagtatttatgtgcttgatgtgttccaagcactgccttaaatgctctggcatgtgtaatacatttgatcctaacagaaaacctgtgaagtcaaaactattactattcacttttcacagatgaggaaaatataatgagaaacattacatgctttgcccaaagtcccagagttattaagtgatagagggaggactaaccctaggcagcccgtgctcttaatactgaactttgcaagaaattcttgcatttcttttcccacgtcttttagacacgtgtttaaaggaaactccctttaaaatactgttctctaccatgctctagaatgcatgcaacccaccactgagaacagtattttaaaggatgtttccaaggtataattcagggcctgtgctgatttgcccgtgtgtcctgtgctggttttatcctgggtctggtctgtgccgagttgtccatcttccccttaagtcttgctgggaataaaatttacttttttcttgtgcctttgatgggaacacaatcattgaagactttgcttttccttcttagctctgatgacagctgtttgtttactgctgctgcctcgtttctctcatatgaacccttcatttcttcatgagttcttactatatggcagtgactaacagcagatcatccactgtgtgctggaaggacagaggggattgtcattcaactagtagggaaaaaaatcgatttctgtttgtgatgtcatcatgaaaatgacttcattgaaactcagcactatggaggttctttctatgtcttgcctttaaatgtctctgagacaacagtcacctgcgttattattgaatcccttcatggacaacatgctatgggttgcatagactcatttttttcttagaaagtgtgttgctttttttgtgtggatgtgccccagtttatctatccaatgacttactgaaggacatctttgttgcttctaatttttgatagttacacattaaggtgttatcagcaaaagaaactatcaacagagtaaacagacaacctacagaatgggagaaaatatttgcaaactatgcatctgacaaaggtctaatatccagtatcttaaggaacttaaatttacaagagaaaaacaaacaaccccattaaaaaagtgggcaaaggacataaacagatacatctcacaagaggacatatatgtggtcaacaaacatgtaaaaaaaagttcagtatcactaactattagaaaaatgcaaatcaggatctcagtgagataccatctcacaccagtctgaatggctattattaaaaagtcaaaaaataacagacactggtgaggttatggagaaaaggaaacccttatacattgttggagggagtgtaaattagttcaaccttgtggaaagcagtatgatgattcctcaaagacctaaaagtagaactaccatttgatccagcaatcccattactgggtgtatctccagaggaacagaaatcattctaccataaagacacaggcatgggaatattcactgcagcactattcataatagtaaagatgcggaatcaacctaaatgcccatcagtgacagattggataaagaacatgtgatacatataagccatggaatactatgcagccataaaaagagtgacatcatgtcttttgtagaaacatgaatggagctggaggccataatccttagcaaactaaactaatgcaggaacagaaaactaaatactgcatgttcttacttataagtgggaactaaatgatatgagcttatgaacacaatgaaataacaagcacagggtctacttgagtggggagggtgggaagagaggagcagaaaagatagctattggatactggccttaatacctgggtaatgaaataacatgtacaacaaaccctcatgacagaggtttacctatataacaaatcttcacatgtacccccaaacctaaaataaaagttaaaaaaataaggtgctgtaaacattcatgcacatgcttttgtgtggacacttgcttttaattatttgagaataaaattgatattttaccgtatggtaagagtatactttactttgtaatacactgccaaattgtctttcaaaatgaatggatgtgccgttttgcattcctaccagcaattaatgagagttcttgttgctctacaagttttttaaccactctaataggtatgtagtggcatcaaattatttgaatttgcattttcccagtgacaaataacaaatgaaattgaacatttttccatatgcttatttgctatgtatctgttatctgtctgtctatctaatctactcacttacctgtctaatctgtcagtcatcattttctttggtgaagtgtctatttagatcttttgcatattttttaattgagttgtttgttttcttattgttgagttttcagagttctttgtatattttagataactgttacttatcaggaatgtgttttgctaatattttctcccattctggggcttgtctgttcattctctaagtgtctttcatagcacaaaatgttttaattttaataaagttcaatttatcacaagtttttagattacaataataaaagcatgatcaaaagcacatttaatcaggcttctgatcatgctttcattattggtaatctgaaaacttgccatcaaatccgaggtcacatagattgtcttttgtggttctttcttgctattgtatagtttcatatttaacattttggtctatcatctacttggagttatttttggtgtaagttttaagatctatgtctaaatgtttttgtgtatagacaattgttctagcaccatttgttgaaaaaaactatcctttttccaatgaattgcaagttaacctcctcttaaaatgtatgttttattgtgttgtggtcagataacaatttgtagttgatatattttaaaaaatatttttgagacttttctttctggactgatatattaaaaaattttaaaaacattcttagatttattcttcatagactgcaattataatggttaaaacaatattattatattatttaaatcatctaagattttgttgatattttagctactcttttatctgttagacgttgatagcttctggctattaatttatttcacttcattcctctttgcattttaagattcttctttattgattttgttatgttttgatttcctattacactttgataaaaatactgttttattgttgtttcctaactgttaatcattgttacttactaaatatctattttctctgttttttttccctaatagaatgctaattttcttttggaagtaagtgggtccattttgaacaaaaattaccatattttctagcatcccttcagcttcaagatggccttgtggtgaatatcaggctattgaaacataggctgcatgttgactgagaattttagacagcttttctttcccagcgtagagtccctttctccctgttacttgttctttcttcatcttgtcttcaatacaattggggagtaggagatggggtagctatctatgacaaacacaagtttccttcatctcagaagagttgtcttctttttgttgttgttgtttttacttttcatcttttccatattctttcttaccttcttttagcattctgatatgtgtatgtggagatgtgagagagaaagtgatacagaaacagcaagagagaagacagggaaggaaaagaaggaggaggaaaggaaagaagagaggagagcactgagggagggaaggaagaaggagaggatgtgttggatttgctgtcctgtttcttgatcttttctctttacattttcattccattttaaatttcacctgttttctgcaagaaatttcactagctagctttcctcttcacagacttgtttgtcatctgtaatctactctttggtcattgcaaaatcagcatttaaagcaatttatattttagtaattaatatgccagtaaagcataaaatgtaagagtacagcctcaagaattacaaaattgggttctaatcccagttcaatcactagctattttatcttgagcaaagaaacctaccttctacctgcttgttttcccatttgtagaatggatataaaaatggtacctcctgattgatagggtttggggagtattcaatgagaagctgcatacaaaatatctaaaatgggtctggaatgtatcaagtcctagctaatttttgtcctgtgctattacataattatcaatttattatgtttttagtggtaattggaaggttaagagaataattgagcttaataattcctaagcagtcaattccttcagataagttcaaataccaagtatgcctgctgattaaaaagcacagtgtttcaatactggtacaccaatgtcatagcagcattattcataatagccaaaaagtggaagcaatcccaatgcccatcaacagatgaatggataaacaatatatctacacatacgatggcatatataatggagtagtattcagctctatataggaatgaagtacgaatacattctacattatggataaaccttgaaaacattttactaagtggaataagccagaaataaaagcacaaatgttacaaatattgtgtgattccaattctctgaggtacctagaataggcaaatccatagagaaagaaactagaatataggctaccaaggctgggagaagggtagcatggggagttattatgtaatggggatggagcttttgtgttggatgacaaaaacattttggagatggatggtagtaatgattgcacagcactgtgaatgtacttaatgacacttcatttgtaaactttaaaaaggggttaattggtacttttacattatatatattttaccacaatataaaagaagaaacaaacaaaaacacccagaaggaaagtttgaagtatcatttggatgtttcccttttcacgcctgactttgcattatctgcaatgattaagcctatataaatcagtctaccatgtcgaaactgacaatgtgtcaaacatactgtggatgcgatgtcctcactatttctcagatcttcagaatgtcatttgccacaggctagaaaatataaaagatgaggccaggctcagtggctcatgcctgtaaatcccagcactttgggaggccgaggcgggcggatcacgaggtcaggagaccgagaccatcctgtctaacacggtgaaaccccgtctctactaaaaatataaaaaattagccgggcctggtggcgggcgcctgtagtcccagctacacgggaggctgaggcaggagaatggcgtgaacccgggacgcggagcttgcagtgagcagatatcgcgccactgcactccagcctgggcgacagagcgagactccgtctcaaaaaaaaaaaaaaaaagaaagaaagaaagaaaaaaaagaaaatataaaaggtggaagcagggggtagtggctggatctgaactgaaggaactgtcctgcccccaactttccaaggaatttgtgaatactcactcgcaagagctcaccacaaagttcattgttactagtcaccagctttggctttcttactgatttctacaagcagaattctggtacactgttcattaaaatgcactagtatggatcaaagtaggaaattttaccgttaattagtatgaaatgaacttaacttgaaacatcgtaaagctgacatgctatatgttctgggatttaatcccattttcccgtgtctgcagattcagaaatcaaaaatattattttaataggattctgaaactcaactctactggggtgacagagaaataccctgcaagtaataaacaaaaggcaacgctcataatcatctttcttgaatattggaaaacatactggaaaaatagataattattctgggaaaatgtgtgttaattatgaaaaaattaaaaaagaaaacagtctcattttcttttgaaatataaagtaaaacattttatttgaacctatttagccaaatttacattttaaacattagaattagttttctgccaatattattaagaaaataaaaaaggattacaaactggatgcatcatttattttaccagaaaagacacttggtctcagttgaacaatttgccaattcaagatggggttagagggggagtcagacttttacctttttccatgagtggttaaacgtggacaatttcttgggcatcacacagacaattaaaacacaagttaaattcatacctttattagggtttgatttatggtaaaaatattgttatggtggcatcatttgcagatctgataaaatgttagtgattgcgcactggtgcacagtcagttgatgaattcatggcatttcatgtttgtttcatttttttgtttgttttagtctcttattttttttttattatactttaagttttagcgtacatgtgcacaatgtgcaggtttgttacatatgtatacatgtgccatgctggtgtgctgcacccattaactcatcatttagcattaggtatatctcccaatgctgtccctcccccctccccccaccccacaacagtccccagagtgtgatgttccccttcctgtgtccatgtgttctcattgttcaattcccatctatgagtgagaacatgcggtgtttggttttttgtccttgcgatagtttactgagaatgatgatttccaatttcatccatgtccctacaaaggacatgaactcattcattttttatggctgcatagtattccatggtgtatatgtgccacattttcttaatccagtctatcattgttggacatttgggttggttctaagtctttgctattgtgaatagtgccgcaatcaacatacgtgtgcatgtgtctttatagcagcatgatttatagtcctttgggtatatacccagtaatgggatggctgggtcaaatggtatttctagttctagatccctgaggaatggccacactgacttccacaatggttgaactagtttacagtcccaccaacagtgtaaaagtgttcctatttctccacatcctctccagcacctcttgtttcctgactttttaatgattgccattctaactggtgtgagatggtatctcatttgtggttttgatttgcatttctctgatggccagtgatggtgagcattttttcatgtgtctgttggctgcataaatgtcttcttttgagaagtgtctgttcatatcctttgcccactttttgatggggttgtttgtttttttcttgtaaatttgtttgagttcattgtagattctggatattagccctttgtcagatgagtaggttgtgaaaattttctcccattttgtaggttgcctgttcactctgaaggtagtttcttttgctgtgcagaagctctttagtttaattagatcccatttgtcaattttggcttttgttgccattgctttttgtgttttagacatgaagtccttgcctatgcctgtgtcctgaatggtaatgcctaggtcatgtttgtttcatttgtgggtagatactaacttgttttggctccctttgactactagattcaatttatctacattatccagaaaggctaaaaggcaggatgcatagaaaccttttcccattcgcaaacaggccagaatgtttgagaaaagatgaaaagcaaagtaaattttctataaaataccctttgggtttttttctaaagtaaaccctttctaggttctagtcaggtggaacatgcctgctgatctgaaatttttcacttctaaatactgttcataaattatgtgattgaggagtttactgatatttgatccagtcttttcatgtaaaatagttgcttttaaaactgccaaccactaaacatgcagtgctaggtacaaataatttttgaataacaggcctcatagggaattatggcaagaatgcttcaactgatgaaatgctagctacatttttttaaaagggcttagaaaaattatgggcgatgaggtggtgctactcaactgtagaaacaaccatgggctgaactcatagatgattgattctgctatggtcttaatcttggtgtaagtttatataggaaataattagatatattggagagatctaaaagttatgtggcctaagcagaaggaagacaagatttttctgcattggaaagggcagtatatgaatcagctgactttcatgggcatcttttatccgtcaatcaactcaattttaatgagcaaatagaagcagtatcttacaacaggaaaaaaaacaggcatgactgaaatcctaagtctaggtttcagaggcagtatcgagttgcagttaagggcctaaagtgtaaagcttaacttctttgggttgaaactcaactctatttctttctgacgactatgtgatctggtcaagctatttaaaatttctgagcatctatttcttcaaatagaaaatacaaatgatgacaagtctactcctctactctagaaaaatatagggttttcataaggaataaatgagtgagtatattgaaataccttagggtaatgctttcacagtgtacatacgcagtaagtgttaggtattcctaggattgcacttgtgtcagtcattgatgaccaattcaaatttttacttctctgacccttagtttttccttctagaaagttagaaggatgaaatggatccatgggttccaaatgtattttaggcatgaactcttttcttgaacagctcttcttgtgcactcatcgtgtacataaaacagatgacacgcaggttgtcctggcagaagcagacaccagggtcaagagcactggtggcttctcatactccctgtcaaaaggtcactgaagggttttggctggacgcggtggctcacgcctcactttgggaggccgagatgggtggatcactggaggtcaggagttagagaccagcctggccaatatggtgaaaccccgtctctgataaaaaaatacaaaaattagccgggaatggtggcaggcacctgtaatcccagctattcaggaggctgaggcaggagaatcgcttgaacctgggagacagaggtttcagtgagccgagattccactactgcactctagcctgggagacagaacaaaactctgtctcaaaaaaaaaaaaaaaaaaaaaagtcactgaggggattctaaagaattctacagctacatggagtgtggaattgttttcaaaaccctgattttaaggacatacttgattgttagcttttagctggctttatagtcttaggtaaattacccgtttatctgaacctcagattccacatctgtaaaatcaaagtagaaatgaagaatgacttgggaaatggagtagaaaatgtagagtgcttagctccaagcccgaccctgagaaatcgtagtttaataaatacaagctaaaaacatcaccacaagaaagaaggtagtaaatatgatgttcaagcagctctctgatgagaatgaggtaatttgaagtgtgattcagccggggcttgtctcaaatccctttgagagaagagattccaaagttttgcgaaaggttattcttgatcaggaaaacattccatttttctttacagtcaataagtttatatgaccttaagaaatttcagctgagatattttttctgttttgttttttgttttttgttttttttttttgagatggagtctcgctctgtcgcccaggctggagtccagtggtgtgatctcggctcactgcaaggtccgcctgctgggttcacgccattctcctgcctcagcctcccaagtagctgggaccacaggcacccaccaccacgcccagctaatttttttgtatttttagtagagacgtggtttcatcgtgttacccaggatggtcttgatctcctgacctcgtgatccgcctgcctcagcctcccaaagtgctggaattacaggcatgagccaccaccctcggtcagctgagatatttgttctatctccactttaacctctggctttccatgtcttccccttacatgggggccttggggtatataatagggcagagctgggttaaataattgatttttaaaattctagtttttttagcttaaggattgaactcctaaatttaataactctactggtccctctcttttctccaaaaggtttcaggtttctgtggtgttgtttgaagggaactggggttgacaaattattgcataatacactcttaggagaacgatcttcttgggaatcatgatatcagtatgtttgagataagatcttgttctctttataaggattcatcatttcccaacttgccataccaatgcttgccttctttctagtgatcccaggactcagtggtcactattactaaagtgcaaggtgcactcctgaagaagtaatcatagcagtgggtaaatagatggagagatgaacaaagagataaggtacagagagaataaggctgcatgcataatcacagctgctcttcataaatagtttggctgcagtgtgtaacaataaacagtgagcctttttcatatgatcttccagtgtttttctctttagattataatctcttagatttacaagatactatatttatataatctagattacaatgaattagattgtaattaatataaccaaaattttagattacaattaacataatctaatctcttatattaatctaagagattataatcttaagattattagtatgatatctttagattataaactcctagaggacaggtataatgtcttatttttctctttatgcaaatttaataaatttttattaagcatcttctaaaacgcatagaactgtgtaaggtgataaatacttgctcaatgtacacataaaaaggaaaataatacaatgaaataatatttgaaaaatattgccaaaactttatcttttattttttcaatttaaatgtgaaatgtttgttttcagatcgttgtggcaaagatcgatgtaaagtagctaccagttaagttttaaatgataggttttacataaaaacataaaaataaaaaccattcattttacctttcattccgtgcttcaattccatgaaaaccctccctacagatttcgaatgtgaagagttcaatttcacattgcttctagattcccactggtggcttttctcactcttaaatggttcttcacattgatgttcacagtcattgtctcagacattgaagatgaagtgtgtttgtgatggaaaaaaaaagttctttaagctacctggaaatagtgcctctatttatgtttaaatacaaagtaagggttgatcttctcgctggtgaagtgtttacattgatgtttggagaggcatcctcccctacggaagcattcgagtactgacgataggcctttcggcattgacaccgctgggtgtaagattcagatgagttcagtccagctaatgaagaggtgttattatttcttatattctttccttggctttcttttttaatttggagaggcacagttaagttttgtttaggacagtactacgattacatgtaatcaaaatgtgattccactcatgtaatcaaaattatgtgaataattggattactcatgtaagaaatccaatataggcatttcatataaatcatgtcatttaatactcacaacaacttgaaaagttagataatattactcccattttataaaagagctaaccaagattcagaggcgttaaataaatttttaaggacacacagtatgaacacagatatgtctgtttagagggtttatgcttagcaattataatagacttcaaaacatatttacaaaatgccatcttgtttcttgacaatgaggtaggttttgacacagaagctgcaatgtattgatccttccaaaggagggaaaaccaataccttaagtaaataatccaacatgtattcaatgaacaacgttgaattcccataacctaatatgatgataggttctgggatgaaatggtgggaaaaaaaaagacattcacagagtttatactgtagaccaagggtcagcaaactgtggcccaattgtcaaatctgggcaatgacttgtttttgtaagtaaaattttagtggaacacagccataccattttttttttttttgttttacacattgtctatggatgcttttgcactgcaacagcagagttccatttaacagaggttgtatggtgtgcaaagccaaaaatatctgcagacctctagtctcatttgctgacttctattctagagcaatagccagacatctgggggaaagccagagctttctgggggaaatggcatctgagatttcatgtggatacaaaatctccaggagtagcagggattgggaaggaggggacagcaaagggttaagtatacttgaggctttgaagccccttatgagaaatccaagggtaaaaaagaatagttctttagaggatctgaaatattcagtggaaacataggatgaatacccaacgtctcagctcaggaatcttggtatttctagttacttctacatataagggtaggggtatctcaccaccactaatccccacatgttcaagacaaaccccattttggacttccatgagttctggaacgtcgtaaaggacatactcaggactgtcagactggtattgagtgaaggcaggataagtctggcgctggcagagtctccatcctatgccaacagcaggaggaagtgggccacacctgagtgcacgtgatagatgtgaggttcttgctccagtgaagctcctgggcatttcagcagagagtctttagattcagtcagtcagtacttggttggtagtgtgggctgcctcccagggaatacatcccaggacccaatcccaacccacttgctcagccctcatccacccaaatgtttgcagcttatgcatccaaatctctcttgccatgcctcaatttattttttattatactttaagttctagggtacatgtgcacagtgtgcagatttgttacatgtgtacacatgtgccatgttggtgtgctgcacccattaactagtcatttacattatgtatatctcctaatgctatccctcctccctccccgcacccaaccacaggccccagtgtgtgatattccccatcctgtgtccaagtgttctcattgttcagttcgcacctatgagtgagaacatgtggtgtttgattttccgtccttgcgatagtttgctcagaatgatggtttctagcttcatccatgtccctacaaaggacatgaactcatccttttttatggctgcaaagtattccatcgtgtatatgtgccatattttcttaatccagtctgtcattgatggacatttgggttggttctaagtctttgctattgtgaatagtgctgcaataaacatacgcgtgcatgtgtctttacagcagcatgatttataatcctttgggtatatacctagtaatgggatggctgggtcaaatggtatttctagttccagatccttgaggaatcaccacactgtctttcagaatggttggactagtttacagtcccaccaacagtgtaaaagtgttcctatttctccccatcctctccagcacctcttgtttcctgactttctaatgatcaccactctaactggtgtgagatgatatctcattgtggttttgatttgaatttctctgatggccagtgatgatgagcattttttaatgtgtctgttggctgcataaatgtcttcttttaagaagtgtctgttcatgtccttaacctacttttttatggggttgatttttttcttggaaatttgtttaagttttttgtagattctggatattagccctttgtcagatgggtagattgcaaaaattttcttccattctgtaggttgcctgttcactctgatggtagtttcttttgctgtgcagaagctctttagtttaattagatcccatttgtcaattttggcttttgttgcccttgcttttggtgatttagtcatgaagtccttgcccatgcctatgtcctgaatggtactgcctaggttgtcttctggggtttttatggttttaggcctaacatttaagtctttaatccatctcgaattaatttttgtataaggtgtaaggaagggatccagtttcagctttctacatatggctagccagttttcccaggaccatttattaactagggaatcctttccccatttcttgtttttgtcaggtttgtcaacgatcagatggttgtagatgtgtggtattatttctgagggctgtgttctgttccattgctctatatctctgttttggtaccagtaccatgctgttttggttgctgtagccttgtagtatagtttgaagtcaggtagcgtgatgcctccagctttgttcttttggcttaggattgtcttggaaatgtgggctcttttttggttccatatgaactttaaagtaattttttccaattctgtgaagaaagtcattggtagcttgatgcggatggcattgaatctataaattaccttaggcagaatggccactttcatgatatcatttcttcctatccatgagcatggaatgttcttccatttgtttgtgtcctcttttatttcgttgagtagtggtttgtagttctccttgaagaggtccttcacatcccttgtaagttggattcctagttattttatctctttgaagcaattgtgaatgggagttcactcatgatttggctctctgtctgttattggtgtataggaatgcttgtgatttttgcgcattgattttgtatcctaagactttgctgaagttgcttatcagcttaaggagattttgggctgagatgatgggattttctaaatatacaatcatgtcatctgcaaacagggacaatttgacttcctcttttcctaattgaatacccttgatttctttctcctgcctgactgccctggccagaacttccaacactatgttgaataggagtggtgagagagggcatctctgtcttgtgccagttttcaaagggaatgtttccagtttttgcccattcagtatgatattggctgtgggtttgtcacagatagctcttattattttgagatacatcccatcaatacctaatttatgacagtttttagcatgaagggctgttgaattttgtcgaaggctttttctgcatctattgagataatcatgtggtttttgcctttggttctgcttatgtgatggattacatttattgatttgcatatgttgaaccagccatgcctcccagggatgaagccaacttgattgtggtggttaaactttttgatatgctgctagattcggtttgccagtattttattgaggatttttgtgttgatgttcatcagagatattggtctaaaattctcatttttttgcgtctgcaccaggctttggtatcagggtgatgctggactcataaaatgagttagggaggattccctctttttctattgattggaatagttttggaaggagtggtaccagctcctctctgtacctctggtagaattcggctgtgaatccgtctggtcctggactttttttgtttggtaggctattactgcctcaatttcagagcctgttattggtctgtttagggattcaacatcttcctggtttagccttgggagggtgtatgtgtccaggaatttttctatttcttctagattttctggttgatttgtgtagatgtgtttatagtattctctgatggtagtttgcatttctgtgggatcggtggtgatatcccctttatcattttttattgcatctagttgattcttctctcttttcttctttattagtcttcctagcgatttatcaattttgttgatcttttcacaaaaccagctcctggattcactgattttttttgaaggtttttttgtgtctctatttccttcagttctgctctgatcttagttatttcttgccttctgctagcttttgaatgtatttgctcttgcttctctagtacttttaattgtgatgttagggtgtcaattttagatctttcctgcttcctctcatgggtatttagtggtataaattttcctctacatactgttttaaatgtgtcccagagattcttgtatgttgtgtctttgttctcactggtttcaaagaacatctttatttttgccttcatttcgttatgtacccaatagtcattcaggagcaggttgttcagtttccatgtagttgagtggttttgagtgagtttcttaatcctgaattctagtttgattgcactgtggtctgagagacagtttgttatgatttctcttcttttacatttgctgaggagtgctttccttccaactatgtggtcagttttggaataagtgtgatgtggtgctgtgaagaatatatattctgttgatttggggtggagagttctgtagatgtctattaggtccacttggtgcggaactgagttcaattcttgggtatcctttttaattttctgtctcattgatctgtctaatgttgacagtggagtgttaaagtctcccattattattgtgtgggagtctaactctctttgtaggtctctaaggacttgctttatgaatctgggtgctcctgtattgggtgcctatatatttaggatagttagctcttcttgttgcattgatccctttaccatcatgtaatggccctctttgtctcttctgatctttgttggtttaaagtctgttttatcagagactaggattgcaacccctgcttttttttttttgtttgttttccatttgcttggtagatcttcctccatccctttattttgagcctatgtgtgtcttagcatgtgagatgggtctcctgaatacagcacagtgttgggtcttgactcttaatctaatttgccagtctgtgtcttttaattggagcatttagcccatttacatttaaagttaatattattatttgtgaatttgatcctgtcatgattttaactggttgttttgctcattagttgatgcagtttcttcctggcatcgatgatctttacaatttggcatgttttttcagtggctggtaccggtttttcctctccatgtttagtgcttccttcaggagctcttgtaaggcaggactggtggtgacaaaatctctcagcatttgcttgtctgtaaagtattttatttctccttcacttatgaggcttagtttggctgtatatgaaattctgggttgaaaattcttttctttaagaatgttgaatattggcccccacactcttcttgtagagtttctgccaagagatccgctgttagtctaatgggcttccctttgtgggcaatctaatctgttagtctaatgagcaatcatgcctggactgtttattctttttatttccttttagagagacttcaactgttcattaaacaagagctggcatcactgagagacagtatagtgaatacaagtaggaattctgatgccagattttccaagttcaaagctaaaagctgtgtgatgttgaggaaggttgttgtgtttctcagggtttagccattgtatacttgaagtgaagaagtgaacttgatgttctgcctcactgagttgtttccctcattgaggagcagtggtgttactactgttagaactttgctcacagcaaatgctgtatatgtgggagttatggttatcgtatcattgacttaaaacccagttcccctttcctagaaggcagggtttccctacaaagggttagggaaaccattggtcttctatatcaatatatctatattgggtatagagagaaatgtgaggagtagacagggcaaggtctagggtacctcactctccttggaaccactttttgagggtacataaaaagcaagactcaagacagataacactcaatgaaatattgttagaaacaaaaagtattgcaaaaatctatgatgaacaaaatatcaaacatttaaattaagaaatgctatgttgagctacaaacgtactggagacaaaaggaaaatcataacgtgaatagaggtgtcctccctctgcaccaatatagcatgaaaaggaaaataaaatagcaaaatgtccagatcacagcacactgaatatccatgacatggtgccgcctggaatgaagactgtgaagaagagaacagggagtgataaaagcagagggggagctgctgtttgatctggcttgttaaagattataagctttatccccacagcaaaagggatccttgaagggttttaagctgggaagtggcataatctgatcctcatggcatataaatcagagaagttcaaatctgtagattctaaaccatacagggtaacaaatagcctcttgaaattaaaaaaaaaagcaagtggtttaaataaactaagtaaatctacatgtattgtctaatgaataaatttttagattagacaggcatagatgtaattattttcaacattagctgggggggggaaagaaagttgattcaaacaagctttatttttgaaactcctcaactttgataactgcaaattttatgagcacccctgcttgaatacttgtgactaagattgaaaaaaaagctattaaaagtattcctggatgatgctaagtcagtgtacatttcaggatgatatttttggcaagaaaggatccatgatatgtagtctctctttgttgtagtttgaaattacctgatggtaattctttaaatttttcatttagaatggaaggttaatagttatcctgcacagttcttgcaaagtgaaaatgagattggaaagttaaaatataattaatttactttcctattatccctttcgctggaggaatattcatgcattctgaacagataagttttaaaagaggcactaaattgtaagtgttcacacttggattcagtttaaaagttaaaagctttcaggccaaataaattagacaagcatgcaagatgaacctccactttaacattaatgagtaagtgtctacctttcacatcactgtgtctgtagtttcagtatgaacaccaaagatgttttcaaaagttgccatggagttatattgatatttattttgtgaataaattattttaagttctatctgttgaaatgccaactatggcctttcaaaatgaagagaagtccagctgtgttttggtgacttgacacggaagatgattctgcaacttgcttgtcacctcttcagcttgctgttgcattatatttcatgtacgttttccctggttgccagcaacagaaatgatatagaaaaatatagctaagtccctaagatccaaagaaaggacaaaaacaaataatgaagttgtctaggaggatccagccaattaattcatcactgtgctatctaaagataactttgcaggatccatgagattaaaaggtgagctgtatttaattttcctttgctttctaattcatttacagcatatacaggtgccattcatgggtgaaatgatggtaggatttctacctgaagactccatttataaattcctcataattgtttttgctgttttttatattatcagatttttctagaatataaaaatagcatgttgcattcaaaacactgaaggaattaaagagacaatgattgttttactgatttatgtattctttcaacaaatatgagttgatggcttaactgtgtaccagatactgtgtctgagaacactgcagaagtcagacagatgtggatgaatgagagaatgcagaggataaacaataaagtggttgtaagaaaaagataggttcagaaggttatgggcactacaaaaataaaaacaaaacaaaacaacacaaaacagagtgatgctccggaaagtaatacaagtagagaagtggcactaatttaggaagttctaagaaggcatttttaaggaactggcatttgaactgagtcctgaacgaagtcctgagggaagcagttatgcaaatatctgggaaagaacatcccaagcaaaggaaaccaaaggctgtgaagcatgagcaagtattgagcttccatcactgagcctagcatatcgtggacgatcaggtttgaaagggaggttgcaaaccggctaagggagcaactaccatccttgagatgttacttttccccttaccgcgtcctctgctcaactgagaacactcatatcttaggacaaaatcaggtcttgaattgtgcctgcacagtggtcctaggggaagtagagaacaatttagggaattctagcaaggatacctccaactttcaactcacaattctacgtattgtcagttaaattcaactcacagctctatgtattgtcaatcaaattcaaaaccattagatctgaaatctgaagtctgcaaattattttgtttaatcttgttttggcagggtagtaaagcattttgtagtaattttaatgtcttaatttttttctatggattttcttctcaaatatccctaaatttatgtgattgtagttataaattgtaactagtatcagtagaaaattaattcagaagacaatctttcacattttagtaaaatttatacacccttaataatttattatgaagttggtaagacctgttttaaaagttttatatcggccgggcacggtggctcacgcctgtaatcccagcactttgcgaggccgaggtgggcggatcacgaggtcaggagatccagaccatcctggcaacacggtgaaaccccgttttctactaaaaatacaaaaaattagcagggcgtggtggcaggcacctgtagtccaagctactcaggaggctgaggcaggagaatggcgtgaacccgggaggcggagcttgcagtgagttgagatcgcgccactgcgctccagcctgggcgacagagcgagactccgtctcaaaaaaaaaaaaaaaaaaaaaaaagttttacatcttgtggcattgtcaatatatctatatttgatatgtttaatgtggttagagatcatgacgtgttttctttatccctcctaaataccatttcacacataaacatctgcaattggaaaagcgattggaaaagggataaacctgctgggtatttgcatcacttggggtgagttttggctatgaataacaaaggccaaaatagcagtacattaaacagaagttttcctctctaatggatactcaattaattgaacatccaaggtgttcaatgaaaggttagtgtcatacttctgctctttgaaaccttagggacctaagttcaggccttcattattttgtaggagaggtcctggacttcatggtatgaaactgtggctaaagtattagcgcatctgtattctatgaagtagaaaaaggaaagaacagataagaaaaaaggcaaaggatgaatatcagctatcatttagagaaaattcccagaagatgctctatgatgcttgtcccgacatcccatttatccataatttgctcatttggtcatagctagctatgaaggaagcataaacttttttttttaaattatgggttaccatatgctcacctctaaaattcagaagtttctctaatgtggaagaaagaaattgaatattgcagataatccaccagtacctgcaacacaaatatattgtttctaattcccttaaaatgtgccaatgcaaactgtaataggaagctgtggataaagctttaaatactaaattcactgcatttataagcctttaataattacagattattttacagtaaatagcaatgtgaattcaatgaaaaagtcgagatttatttttccggaaaaataaaacaaaaagagaaaaagatactaaaaggagtaataagaactggaaagaattttgcaatcataaattttgtcattttcatggtggctctatctttatttgcaatttgacaagtcttctactctctatttgatttgaagacctggtacctccactaaatagctgtgatcctgagtaaattactgaattagagaataatagtaattgtatcggcaaaaaaaaactgctactaatagaaatcttattatgatttttaataagagtattgacctcactggttactttgaaaaataaatgaactaatatgtataaaagagttttgtaagctgctaagtactatgataactcatcattcagaacattggaggttcaaagtaagtgagccttttgtgactattccagctcaaggaattggttttgcaatttgaattaaagacttgacacatggatgaagtttccaaagatccaagacatatcaatctcagaagtctggtctacagagactcctcatgaatataccattcgtgcatggctcagcaggtttcaaaggcccattgtagacccgctggcagaatctccttcacttctccatctacatctaattccatcagaattctctatttccctaactgcaaataattaaaatgaactaatatgcaaataattaaaatgaactaatatttattgagctatgagcaaattattctcctgtgctctgtggctgataaagtgatgagtgagacaattctctcctctcaagctgtttacagtctaagatggaaaataaaatataagctactgattacattgctcaatttggcagttctaaccaagaaaaatgatggtaacagtgacataatgtttctgaaatccaggtcaacctcagtgataaaagactgtatatttcagacagactgccaatatattgaataattttattagtaggtgttttttgtggttttgctctgtgcgtctctatttctatttttctcttctgactgctcctatcacttcaagagaaaatatgtgagagggagctcagaagggagataaactgatttatagaacaattaaaatgtgaatcagcaaattgtctataaaaggcaaaattatcatttaaaaaactggccatgtagcatttttttcggttttcttctgagctgtaacatcactataggtgattttattcctgttttataatgcatcatgcagtacagtggctataaattgttggcatattaattatccatagatggtggtatttttcatataaataaaagtggtttttactgttaatacgtggtataaaatcttagtttctggcatcagtacaaaaaggaaacagcctaaaataaggctgaattaaaatttatatatcaatggagtttggaaaatgtggggatttggagcttaacaaattgatagacaagtagacacatgattcaaacttttggggagtgaagtatacacaatatactatcatcaggaatagggctagggttggtaaatcacagtccaagggccgaattaggtctgctgcctgtttttcataaatgaagttttattggaacatgaccaagcccctttatttacatattgcctatggctgcttttgaactaaggtggcagagttgctttgttgcaaaagatattttactgcatccgaagccaaaaatatttactctctgactcttaatagagaaactttgctgatccctggaactgagccacaagcttgatacaactcattagtcttaattccttctgttctccatgtctgtaacactcttctatctttactcagcttactggctcttactgacgttcagatctcaaagcaaaagtcacttcctcagggctcctcaaggaaacctcctgtcccagaaaacccagccccaacctcaatcagcttctgagcctcctgagacacggctcctccacttctctacaattgtgccctgttgtgtttttctcagagtggttttcttttttcttttttttgagacggagtcttgctctgtcgcccaggctggagtccagtggcgtgatctcggctcactgcaagctccgcctcccgggttcacgccattctcctgcctcagcctccccactagctgggactacaggcgcccatcaccacgcccggctaattttttgtgtttttagtcgagatggggtttcaccatgttagccaggatggtctcgatctcctgacctcgtgatccacccacctcggtctcccaaagtgctgggattacaggcgtgagccaccgcgccaggccagagtagttttcatatctgaaattgcattattgtatatttgtttatagtttcctccccccattagaatgtagattctataaaagtagaactcttatctatctctttctcccccttatcactcgggtctgaagaacttaattcaccctcctcagtgagcattcaccaaatgaacgtgagctcagtcactgtggcagccatctcggatgtctttccaaaggcattcatgttgatgtactgaccacagtcagtgtaaccctggggttccagggggtgtgtgggtatgtgcaggtggtggtggtgctaggctaaatggctttttttttttttttaagagacagggcctcactctgtcacctgcactggactggagtgcattagtgcaatcttatctcactgtggccttgatatcctgggctgtcatgatcctcccacctcagcctcctgagtagctggaactacaggcatgtgccaccaatcctgactaattgttatttttttgtagagacagggtccctatgttgcccaggcttgtctcaaactcgtgagctcaagcaattcccctgtctgcctcccactgtgctgggattataggcatgaaccactatgcctctcctaaatgtcttttcagaaagtgactttctcacttgatttcctgaaatgtttgctttgaaagtttcaggatatgaagagatttatagaaaataccataatagttgtacatcactgtttcttctgtcatgttagggcttatcgtacctgtcagagtttctcgcacactttttcaaaggtatgcttgtgagagggagtcaaagcttgcaatatagactggatgtggccaggcatggtggttggccaggtgcagtggctcaggcctgtaatcccagcactctgggaggctgaggtgggacagtcacattgagcctgggagttcgagaccattctgggcaacatagtgagaacccatctctatgaaaaatttaaaaattagctggttatggtggtgtatgcctgtggtcccaggtactcaggaggctgagatgggaggattgcttgagccaaggaggttgaggctgtagtgagccagtcatgccacttcactctaccctggacaatacagtgttcaggggcttttaaaaatactagcattgggccaggcatggtggctcatgcctgtaatcccagcactttgggaagcctaggcaggcggatcacctgaggtcgggagtttgttaccagcctgaccaacatggagaaaccccatctctactacaaatacaaaattagctgggtgtgttggcacatgcctgtaatccctactactcgggaggctgaggcaggagaatcccttgaacctgggaggcggagactgcggtgaaccaggatcgcaccattgcactccagcctgggcaataagaacgaaactccgtctgaaaaaaacaaaagcaaaaccaaaaacactactgttgctactgctaataaactgaatgtcaggtggggttttgtcctattgtcccacagtaacaaatttggagaatgtgaccttgggcaactcagttcatctttctgattaactgacctgaaattgtatccattttcttaatgtgattgccttcaaatgtatttttttttcagaaaatagatactactaaatatttaattcagcaacaccagttctgtttatggaatattcattacacacttttactgaagttttttgtgttcaattttgtcactgaaaaatcttatgccagagtgcttcacattggctgtactttatgtcattattcctttgtgagatgaagcaaaaggtgatagagtgctcagaaactcaactgtgtaattagacaagacccaagacactccactgtattctcctgaacttccatactaataacctgatcttcctaactatccttgacataggttcttttgtttcactcatcagacttctcagggaaaatacagtggcccacatgtcctatgaattgacaatacttacgttttcaatttcttgatagatcattttgtttatttgcatattccacaaatgtttattgagccttttctgtgttgtgtcgggctgtactggcactgggacacagccatgagcttgcttgatctatcatgaagcttccttctaggactcagtttccaataaaggagtgatgcaagcaaagtgaaatgaagatttgaagactacatatggaaaatggaaatataccacttttcacatgaaaacgcccatctgaaacctacagacatcttagtcccctcttgaattatctggacaaaatgcctatgtatttgtggatagaatgtgtaaagataaaatgacagctgacatttcatgagggctcattgtatgctaggcattttatgaactttatttcttgcaatattattcccatttccaggcgagcaagttaccaaggacacgtagctaatggcggactgagtctggttttaagccaaagtcttactccagagatctaacacttcttgctaccttcaactgcttctcactgcttaggtgacaagtacaccaaaatctcagaaatcacccctaaagagcttatccatgtaacctgaaacagctgtgcccccaaaactgttgaaataccataaaaatttgaaacaataaaaatgacagaaaatgacagaatatatatgtttgtagaagcacaattcacaattgcaaaattgtggaaccaacgcaaatgtccatcaatcaacgagtggataaagaaactgtgttatatatatgatggactcctactcagccataaaatggaattaattaacagcatttgcagtggacctggatgagattggagactggtattctaagtgaagtaactcaggaatggaaaaccaaacatcgtaggttctcatatgcctaagttatgaggctgcaaagacataagaatcacacaatggacttggggacttggggggaagaatgggagagggccgaaggataaaccactacaaatatggtacagtttgtactgctcaggtgatgggtgcaccacaatctcacaaatcaccactcaagaacttatgtaatcaaataccacctgcactccaataacttatggaaaaataaaataataaaaatttaaaaaaatcaagaatcaaaacaggtttgatttttcctcatactgattgtttcctggaaagatgcatgtgtgtcacagaaagtaaaggacaacctaagccagtgaccctcaaactcatgaatgccagtgtttcactgaccatattagaaccactagtgtggttctcagggtggtgaacaaaaaaatagcgacgatgtacatgcatacagccacagatacacacacacacacacacacacacacacacacacacacacacacaggtaccccatacatcacatcctggattccactcaagatattttgtttcagtgcttctaaagtgaaacctaggactatctatttttagtaagctcaataggttactctgttgtacttttggatctagacatttaatctattttatcttactctccacaggttgatttttgcctttccattttctctttgtggacttatttttttccttctattactgggttttgttttttgacatcatcatctcagggaatgagactataccaataccctctgccatgtgtggtcagattatttctttataatttatttttcaagttacctatttcatgtggattggagacactgcctctgatgttccgcttatttacagcaataattttgctctctcagacttttaccagtgagttgattctaaaaatcaacgcttgacatattcaccagaaaatttctataattatattctgaagtggtccagaatctaacagtctaaatacttttgaaaaacaaaggttggtatatattggtaaatggtttttggaaaatcgaattgggacttttgcaagtaatgacttgtgtaatcataggtagacattattcagacttctattaccacacattggcctgggcttttttttttcccctctattaagcaaaacaaaatgttgtaatcaggcagtgctttcgatggaaataactgacattacagggtcttcacttgaatcttcagaattgtcatcccaaagacaaaatgataacctctttcaaaaactagctgtcgggagcaagatggtcaaatagaagcctccactgattatcctctccataagatcaccaaatttaacaactacctacatagaaaagcaccttcataaaaaacaaaaatcaggcgagtgatcacagtacctggttttaactctgcatcgctgaaagaggcactaaagagggtaggaaagacaagtcttaaaagctgatgtcaccagtttcccccacccctcagcagcagctgcatggcatggagaatctgtgtgcatagaggagagagagcacagtgattgtgaaacttagcattggaaatcaggactgccctgtaacaacggaaagcagcactgggtagaactcagccaacatcaatggagagaagatttagaccagccctagccagggaagaactgcccatcacggaagtcagaatttgagttcaggtaagccttgccactgtgggctaaagtggccttggatcctaaataaacttgacaggcagtctaggccacaagggctgtaattcctgggcgagtcgtggtgctgtgttgggcttggagccaatggactgacagggtgtgcaacccagttaggacaccagctagggtggccacgggagtgctttcaccacttctcccccaaccccagacagcacagttcatagttctaggagaatcctttcttccgtttgaggagaggagagggaagagtgaagaggactttgtcttgcgatttgaatgttggcttagccacagtgggatagggcaccaggcagagtcatgagtctcccattccaggtgctagctccctcttgacatctccagacacaccctgggccagaagggaacctgttgtcttgaagggaatgacccagttctggcaggattcatcacctgctgactgaagagcccttgggccctgaataatcagcagtggtggccgggtagttcacaccgtaggcctcgggtgagcctctgagaagtgctggcttctggtgagatctagcacattactagctttggtgactattgggagaatctccttctgcttgagaaaaggagagggaagtgtaaaagggactttatcttgcagttgaggtaccagttcggccacagtggggtagagcaccaagctggctcttggggtctctgcttccaggccttggctcttggacagcatttctggacctgccctaggtcagaggggagcccactgtcctgaagggtaagacccaggactggcatcattcaccacaagctgacagaagagcccttgggctttgagtgaacgtgagtggtagtcaggcagtgcttgccatgggcctggggtgggagtggccatggggagatactccttagcctgtggaaagggaaaggaagagtgggaagggccttgtcttgcagcttgggtgccaattcagacgcagtagaataaagtacaggtagattccttaggtttctgactccaggccctggctcctggactgtatctctatacctgcctgggactggtggaaactctttgccctaaagagaaggacacagcctgtctgggttcaccatctgctgattgtagagtcccagggccttgaacaaacatacatggtagccaggcagttgttcctgcaggccttgggtgatacccagtgctgtattaacttcaggtctgacccaggtctgtactaacttcaggtgaatcccagtggcggtggccacaggagcacttttgtcacccctcccccagttccaagcagctcagcacagagaaagagaccccatttgtttgggagaaagtaaaagaagaaaactagtctctgcctggtaatacagaaatttctcgtggatcttatctaagatcagcaaggtggtacctctatgagtctgcaagagccacagaatactgggcttggagtgactctaatacagatatggctgcgatgacaaaaagcttagatcaaaacacccgaattctcttaaatacctggaaagtcttcccgagaaggacacgtacaaacaagcccagactacaaagactaggataaatatataactcttcaatgtccagatacatacaaacatccacaagcaccaaaacctttcaggaaaaagtgacctccccaaatgaaccaaataaggcaccagagacaaatcctggaaagaaagagacacgcaccctttcatacagaattcaaactagctgccttggggaaacccaatgaaattcaagataactcagagtaggaattcagaatcctattagataaagttaacaaagagattgaaataattaaaaataatcaagcagaaattctggagttaaaaaatacactagttatactgaagaaagcatcagagtctattagcggcaggattgatcaggcaaaggaaagaattagtgagcttgaagacaggctatttgaataaacatggtcagagggacaaaagaaaaaaagagtaaagaagaatggagcacacctatgagatctagaaaacaatgcccaaaaagcaaatctaagaattattggccttaaagaggaggtacagagaaatatagaggtagaaagtttattcaaaggaataataaccaagaaattcccaaatctagagaaagatatcaatattgaaatacaagagagttatagaacactaagcagatttaacccaaataagactacctcaaggcatttaataatcaaattcccaaagatcatagataaagaatggatcctaaaagcagcaagagaaaagaaacaaataacataaaatggaggctcaatatgtttggcagcagacttttcagtggaaaccttacaggccagtagagagtgccataacatatttgaagtgctgaaggaaaaaacgtttaccctagaatagtatatccagtgaaaataactttcaaacatgaaagagaaataaaggtttcctcaggcaaacacaagctgagggatttcatcagcaccagacctgtcctagaggaaatgataccaggagttcttcagtttgaaagaaaaggatattaaggagcaataaaaaaagcatctgaagttacaaaactcactggtaatactaggtacatagaaaaacacagaatattataacactgtaattgtggtgtataaactactcataccttgagtagaaagactgaaagatgaactgataaaaaataataagaacaacttttcaagacacagacaatacaataaaatataagtatcattagaatcaataagaagttaaaaagttgggtgatgaagtgtagtgttttcattagttttcttttagcttgtttgtttatgcaaacagtgttaacttgttatcagtttacacatttaaagcagtgtgtagagggaaatttatagcactaaatgcccacaagagaaagcaggaaagatctaaaattgacaccctaacatcacaattaaaagaactagagaagcaagagcaaacacattcaaatgctagcagaaggcaagaaataactaagatcagagcggaactgaaggagatggagactcaaaaaacccttcaaaaaaatcagtaaatccaggagctggttttgtgaaaagatcaacaaaattgatagactgctagcaagactaataaagaagaaaagagagaagaatcaaatagacgcaataaaaaatgataaaggggatatcaccactgatcccacagaaatacaaactaccatcagagaatactataaacacctctatgcaaataaactagaaaatctagaggaaatggataaattcctggacacagacaccccccccaccaagactaaacgaagagaagttgaatccctgaatagaccaataacaggctgtgaaattgaagcaataattaatagcttaccaaccaaaaaaagtccaggaccagaccaattcacagccaaattctaccagaggtagaattctacaagaggagctggtaccattccttctgaaactattccagtcaataattgattttatgaggccagtatcatcctgatatcaaaagcctggcagagacacaacaacacaaaagagaattttagaacaatatccctgatgaacatcgatgcaaaaatcctcaataaaatactggcaaaccgaatccagcagcacatcaaaaagcttatccaccatgatcaagtgggcttcatccctgggatgcaaggctggttcaacatacacaaatcagtaagcgtaatccatcatataaacagaaccaaagacaaaaaccacatgattatctcaatagatgcagaaaaggcctttgacaaaattcaacagcccttcatgctaaaaactctcaataaattaggtattgatgggatgtatctcaaaataataagagctatttatgacaaacccacagccaacatcatactgaatgggcaaaaactggaagcattccctttgaaaactggcacaagacagggatgccctctctcaccactcctattcaacatagtgttggaagttctggccagggcagtcaggcaggagaaagaaatcaagggtattcaattaggaaaagaggaagtcaaattgtccctgtttgcagatgacatgattttatgtttagaaaactccatcgtctcagcccaaaatctccttaagctgataagcaacttcagcaaagtctcaggatacaaaatcaatgtgcaaaaatcacaagcatttctatacaccaataacagagagccaaatcatgagtgaactcccattcacaattgcttcaaagagaataaaataactaggaatcaacttacaagggatgtgaaggacctcttcaaggagaactataaaccactgctcaatgaaatagaagaggacaagaagacacaaacaaatggaagaacattccatgctcatggataggaagaatcaatatcgtgaacgtggccatacttcccaaggtaatttaaagattcaatgccatccccatcaagctaccaatgactttcttcacagaattggaaaaaactactttaaagttcatatggaaccataaaagagcctgcattgccaagacaatcctaaaccaaaagaacaaagctggaggcatcacgctacctgacttcaaattatactacaaggctacagtaaccaaaacagcatggtactggtaccaaaacagagatatagaccaatggaccagaacagagccctcagaaataataccacatatctacaaccatctcatctttgacaaacctgacaaaaacaagaaatggggaaaggattccctatttaataaatggtgctgggaaaactggctagccatatgtagaaagctgaaactggatcccttccttacacattatacaaaagttaattcaagatggattaaaaacttaaatgtgagacctaaaaccataaaatccctagaagaaaacctaggcagtaccattcaggacataggcatgggcaaggacttcatgactaaaacaccaaaagcaatggcgatgaaagccaaaattgacaaatggaatctaaagagcttctgcacagcagaagaaagtaccatcagtgtgaacaggcaacctacagaatgggagaaaaattttacaatctacccatctgacaaagggctaatatccagaatctataaataacttaaacaaatttacaagaaaaattcaaagaaccccatcaaaaagtgggttaagggtatgaacagacacttctcagcagacacatgaaaaaatgctcatcatcgctggccatcagagaaatgcaaatcaaaaccacaatgagataccatctcacaccagttagaatggcgatcattagaaagtcaggaaacaacaggtgctggagaggatgtggagaaataggagcacttttacactgttggtgggactttaaactagttcaactattgtggaagacagtgtggccattcctcaaagatctagaactagaaatacccagccatcccattactgggtatatacccaaaggattacaaatcatgctgctataaagacacatgcacatgtatgtttattgcggcactattcacaatagcaaagacagaactaacccaaatgtccatcaatgatagactggattaagaaaatgtggcacatatacaccatggaatactatgcagccataaaaaaggatgagttcatgtcctttgtagggacatggatgaagctggaaaccatcattctgagcaaactattgcaaggacagaaaaccaaacaccgcatgttctctctcataggtgggaattgaacaatgagaattcttggacacaggatggggaatatcacacaccagagtctgttcgtggggtaggggtagtgggggagggatagcattaggagatatacctaatgtaaatgatgagtaaatgggtgcaacacaccaacatggcacatatatacctatgtaaaaacctgcacgttgtgcacgtgtaccctagaacttaaagtataataaaaaataacagtgagttatgagataatatctacaaacctcatggtaatctcaaatcaaaagaacatacagcaagtacacaaaaaataaaaaccaaaaagttgaaacataccagcagagaaaatcactttcactaaaattaagacaagaagcaatgaaagaagatagtaccagaaaacaaatcataatatgtcaggagtaagtccttactcatcattaataacattgaatgtaaatggactaaacactccaatcaaaagacattgggagaggctgaatgaattaaaaaacaagaccccattgtccattgcctagaagaaacatacttcacctataaagatacaaatagactgaacataaagagatagaaaaagatattccgtgcaaatgaaaaccaaaaaagaggaggaatagctgtagttaattcaggcaaaatagatttcaagacaaaaactataaaaagatataaagaaggtcactatataataacaagaaggtcaattcagcaagaagatataacagttgtaaatatatatgcacccaacactaaagcaccaagatatacaaagcaaatattattagagctattataaaagagatagaccccagtagaataatagctggacactttaatatcctacttgcaccattggacagattattcagacagaaaatcaattttaaaaaatcatatttaacctgcactatagaccaaatggacctaatagatatttatggaacattttatctaatggctgcagaatacacactcttttcctcagcacatagatcattctcaaggatagaacatatgttaggtcacaaaacaagtcttaaaaaattcagagaaaataaaattatatcaagtaccttctctgaccataatgagataaaactacacataaaaagaggaaattttggaattatacaaacacatggaaattaaacaatgtgcttctgaaagaccagtgggccaataaagaaaattttaaaattttaaaagaagaaattttaaaattcttgaaacaaatgataatggaaacatgacacaccacaacctatgggatacactgaaagcagtactaagaggaaagtttatagctataagcacctacatcgaaaaagtagaaaaacctcaaatactcaaataacctaattattcacttataagaatgaggaaagcaagaagaaagaaacccaaaattagtagagaaaaagaaataataaagattagagcagaaggaaatgaaatcgaaacaaagaaaacaacataaaagatcaaggaaagaaaaagttgaaattttgaaatgataaacaaaatggaaaaacctttagccaaactaagaataaaagagaaatgaccaaaataaataaaatcagaggtacaaaaggagacattacaacagcaaaatttccgaggatctttagaggctactatgaacaattatatgccaataaattgaaaaaatctagaggaaatgggtacattcccagacacttaaaatctaccaagattgaaccatgaaaaaatctaaaatctgaaaagaccaataacagttatgttagctggttattttgctcgttagttgatgcagtttcttcctagccttgatggtctttacaatttggcatgtttttgcagtggctggtaccagtttttcctttccatgtttagtgcttccttcaggagctcttttaggctggcctggtggtgacaaaatctctcagcatttgcttgtctgtaaaggattttatttccccttcacttacgaagcttagtttggctggatgtgaaattctgggttgaaaattcttttctttaagaatgtcgaatattggcccccactctcttctggcttgtagagtttctgccgagagatcagctgttattctgatgggcttccctttgtgggtaacccgacctttctctccggctgctcttaacattttttccttcatttcaactttggtgaatctgacaattatgtgtctcggagttgctcttcttgaggagtatctttgtggagttctctgtatttcctgaatttgaatgttggcctgccttgctagattggggaagttctcctggataatatcctgcagagtgttttccaacttggttccattctccctgtcactttcaggtgcaccaatcagatgtagatttgatcttttcacatagtcccatatttcttggaggctttgtttgttttttttttttttattcttttttctctaaacttctcttcttgcttcatttcattcatttcatcttccatcactgataccctttcttccagttgatcacatcggctactgaggcttgtgcgttcgtcacgtagttctcgtgccatggttttcagctccatcaggtcctttaaggacttctctgcattagttattctagttagccattcgtgtaattttttttcaaggtttttaacttctttgccattacagacacttctcaaaagaagacatttatgcagccaaaaaacacatgaaaaaatgctcatcatcactggccatcagagaaatgcaaatcaaaaccacaatgagataccatctcacaccagttagaatggtgatcattaaaaagtcaggaaacaacaggtgctggagatgatgtggagaaataggaacacttttacactgttggtgggactgtaaacaatttcaaccattgtagaagtcagtgtggccattcctcagggatctagaactagaaataccatttgacccagccatcccattactgggtatatacctaaaggataaatcatgctgctataaagacacatgaacatgtatgttgattgcggcactattcacaatagcaaagacttagaaccaacccaaatgtccaacaatgatagactggattaagaaaatgtggcacatatacaccatgacatactatgcagccataaaaagaaatgagatcatgtcctttgtagggacatggatgaagctggaaactatcattctcagcaaactatcgcaaggacagaaaaccaaacaccgcatgttctcactcataggtgggaattgaacaatgagaacacatggacacaagaaggggaacagcacacaccggggactgtggtggagttggggtacgggggagggatagcattaggagatatacctaatgttaaatgacgagttaatgggtgcagcacaccaacatggcacatgtatacatatgtaacaaacctgcacgatgtgcacatgtaccctaaaacttaaagtataataataataaaaaaaaacaagtaatgagatcaaagccataataaaaagtctctgaacaaagaaaagcccagggccttaggggttcactgctaaattttaccagatatttaaagtacacctaataccaatcctgttcaaaggattcacaaaaatagaggtgcaaatacttccaaactcattctgtgaagccagtattaccctgatacaaaaaccagaaaaagtctcatctaaaaaagaaaacttcagaccaatatttttgaggaacattgatgcaaaaaccttcaagatattagcaaattgaatccaataacacattaaaaaggtccttcatcatgagcaagtaagatttatcccaggaatgcaaggatggttgaacatatacaaatcaatcagtgtgatacatcatatcaacagaaagaaagacaaaaaccatataatcatttcaattgataataaaaaaatagataaaattcaacatccattcatggtaaaaaccctcaaatattgggtacagaaggaacatacctcaacacaataaaagccatttatgacagacccatcaaaacactgatgactttcttcaccaaaatagaaaaaataaaaatcctaaagtttttatggaacttcaaaagacccggaatagccaaagctatcttgagcaaaaagaaaactggagaaatcccaatacctgaccacccatatgctacagggatatagtaaccgaaacagcatggtactgacttaaaaccagacacatagattaatggaacagaatagagatcccagaaagaaatccatacatctacattaaactcatttttgacaaaggtgtcaagaacatacatttgggatgtatgtatgttttcaataaacagtgctgggaaaactaaatattcatatgcagaagaattaaactagaccccctacctctcacaatatacaaaaatcaaatcaaaatggattaaagacttaaatctaatacctcaaactatgaaactacttaaagaaaacattggggaaactcttcagtacattggtctgggaaaatatttctttaaaaatacctcacaaacacagacaaccaaagcaaaaatggacaaatgggatcacataaagttaaaaagcttccacatggcaaaggatgcaatcaacacagttaggagactacccacagaatgggagaaaacatttgcaaactatccatttgacaacggattaataaccagagtacataaggagctcaaacaactctgtaggaaaaaattctcaaaatctgagtaaaaaatgggcaaaagagctgagtaaacatttctcaatagaagacatacaaatggcaaacaggtatatgaaaaggtgctcaacaatcattgattatcagagaaatgcaaatcaaaactacaatgagatatcatctcatcccagtaaatacagctttcatccaaaagacaggcaataacgaatgctgatgaggatgagaagaaatgggaaccctttttggtgggaatgtaaattagtacaactactaaggagaactgtttggagttttctcaaaaaactgaaaattaaactactatatgattcagcaatgctgctgctaggtatatgccccaaagaaaggaagtcagtattttgaagagttatctgtatgcccatgttcattgcatgttaattccatgttaattgcagcactgttcatgatagccaagatttcgaatcaatctaagtgtccatcaacggaagaatggataaagaaaacggggtacatatacacaatggagtactattcaacaaaaagaatgagattctgtcatttgcaacaacatggatggaactgaggttcattatgctaaatggaatgagctaggcacagaaagacaaacatcacatgttcttgcttattcgtgggagctcaacgttaaaacaattgaactcatagagataggaagtagaatgatggtaaccagaggctgagaaggggagttggtttggggtggaaggagaaatggttaataagcacaaaaatatggttagatagagtgaataagatctagtatttgacagcacaaagggtgactacaattaaaaataatttattttacatttaaaaataaatagtataattagctagtttgtaacacggaggataaatgcttgggtgaaaaataccctcattttctctgatgtgatttttatgcattgcatgcctgcatcaaaatatctcatgcactccataaatatatacacctactatgtacccacaatatattttttaaaaaaactgatcaaaccagtgagaaaataagaaagaactcagaaaaactgtggtctttcttcctacatttcatgaaatgctaagcgaacaaaatgaaaatattttagaaatagctaatatgtattttctaatacaatgaacttcttatttatttatttgcttttattatacagtttacttttattttgtttttattttttgagacagggtgttaatctgtcaacctggctggagtgcagtggtgtgatcttggctcacggcaccctcctcttcacaggttcaagcgattctcttgcctcagcctcttgagtagctgggaccacagacatgcgccaatacacctgcctaatttttgtattttttatagagatgggggtttagccatgttgctcaggctggtctcaaactcctgagcgcaaagcaacctgcccaccttggcttcccaaagtgctggtattacaggagtgagctactgcacctggcctatttttaattatttatttatttatttatttatttatttatttatttattcatttactcattcatttttttagacaggtctagctctgttgcccaggctggagtgcagtggtacaaacatggctcactgcagtctcaaccttctaggctcaagtcatcctcctgtctcagcctccagtgtagctgagaccacaggcacccaccacatcattcctgactaatttttttatttctatttttgtagacatagagtctcactttgttgcccaggctggtctcaaactcctgggctcaggtaatcctcctgtctcagcctcccaaagtgttgggattagaggaatgaaccactgcacccagcctaatactttatttttaattgacaaaattgtgtatatttatagtttacaatatgatattttgaaatgtgtgtacactgtgggatgattaaatcaagctaattgacatatgtattacttgatacttactttacttttgtagtgaaataactgaaaatgtaccctcttagtacttttgaagtatacaatacattgttattaactctaaccattatggtataaaatagatctcttgaatgtattcctcctaacaaattttgtattctttggccaacatctccccaaacctgcacttgcctgagaacctggtaactacagttctgctctctgcttctataagttcaacttttttagattccacacatacatgagatcatgcagtatttgtctttctgtgccagtcttatttcacttaacgtaatatcctcctggtttaaccgtgttgtcacaaatgacaggatttccttcatttttaaggctgaaaagtattctattgtatatatacactgtattttctttatccatgcatacatcaatgaatgtttaggttgattatattttttggtcatcgtgaataatgttgcaaagaacacaggagtgcagatatttctttggactaatgatttaattttctatgggaatatgaccattattatgatgacgagatcatatggtagttctacttttagttgttttaggcaaattcatacttcttcccataatggctgtagtaatttacattcccacaatgtacaaacattcttttatttttccacatcctcaccaacacttgttatctttcttttgtgttaatggctattctaacagatgtgaggtgatatctcattctggttataatttgcatttccctgatcatgttgagcatttttttcaaatacctattggtgatttgaatgtcttcttttcagaaatgtctattgagttcttttgcccatttttaattgagttacttgttttcttgctattgtttgagtttcttatacatgtcagatgttaacacttatcagatgcatggtttgcaaatattttctcccattccataggttgtctcttcactctgtggattgcttttgtttgttttttgtttttgctgtgcttgtgttttgtgtttgtagtttggtgaaattctacttgtgtatttttgcgtttgttgcctgtgttttgagggttgtgtacagaaaattattgcccagacaaatagaccaatcagacaggcctttttttgaacttcttcataattaaagcatcaccatggacttggttgtgcctagctttatttactcatcgttatgtctgtgagagtcattcctcttgttgaatgaatcagggttttatttgatttctgtgtggtgttccattgtaggaataaccagagtttctccattttactgtttatggttattggggttgtttctggtttttggcttttgtgaatacacctgttggaaacattcttttgcatatcttttggtgaacacagacactaattattttcagtacatatctggaagtgtagtaggcgtattgatattgccaaggacttttccaaaatggtactatgaaatacactctcgacagcagcgtttaggaattcttgttgtttcatatcattgtcagcacttgatattatcagtcgttttacattttagtattctaatgaacgtgttttgttatcatattggggtttttgttttctttgtactgatgtgctctcattcttcataatgactacatggttgtccaaataagaatctctcatgtttcatttaaccaatcatctgttgatgggtcatgaggctgtttttaacttttttctcttacagactatctttttttttgtacatgtattgttatgaaagcccagaactcgaaacactggttcaaaagttatgcttatgttaaaatttgacagctgtagttttcccaaagaaattgtagccattgatacatctatcaccagtttatgaaaattcccttccccacaccctagacaaaacaatattatgaagtttttaaaatttacatcaatctaatcaatgaaaagtgatagcttatagaggttttattttgcccttttttttttaactgaatgaggtggaatgacttttcatgtttaaaagccgtttggccctcatttcctgtaagctccgaattatattattcatttgcctaatttttctataggattgataatattttattattggtcacagaagctctttatgtatttaaaatagattttaaaaactgtaagggaaagactttttggataatcagcattttaaagaaaaagaaacaaaaaatcaaaagtgaatcctttgtcccaacattataatcacaaagtaatactttccttgctctgtacataacaatagcagtagttcatattcactccatacatcatagttataaagtgtttgtttatgtactctttcatgtaatctttatgccaatactcttactttatgtctgaattcttgttgaagagatccggaaacttagattttaagtaatctgaccaagattgcatgccaacacgagggaaaacctatgcaatatatctaatttcaaacatattataatttcctgtaaactgccctccttctcgaggctttggaaagctggtccaccttggaggtccttttcttcttattcattgctgatctcattcatctctgttcatgcgagatttttcatacagtaggactgaaataaagaagatgtgaattaattaggtctcttatgatttctgattatagagcaattagaaggttatatatactgaaaaactgaggttaaccaaatatgcaaaacagggaattaaatgagtagagtggtgtgtgtgtttgtgtattggactattgacacatttaaaatgtagaaatatatgaattgaagttggaaattattgatgatgtatttttttctgaggcaagcatataacagaataccatgtgtggtgtgattttattgtataacatgttactatattacaagtgacacttacggagtgcttcctacttactgggagctattctaaaattgattcgtggtaacttaatactcataatgcctttgtgagatgggtactttctgtatagaggaatataagttgctcaaggttggtgagttctgactctgggatgtagggactaattactaaagaaagaaggaaggaagtgggggagggagaaaagaaggaaggacagacagaagaaaggatgaaaggaaagaaataacagtggttatctctgagttgtaaaatgaaggttaaattttggtttcttttgtctgcttctttgtattttcttccttatgttcatattcttatttacaattcacatgtaagtcttcgaataaagtaaaatttatatcatgcttgggaagagccttgatgaagggaaaaatattctttaataaacttttattagcttagtttccaaaagttatgggtgtgttagggatatagatatacaactggaattagcaaaactctggtaaattttgagtgaacacaatgtataaagtctgaagaacttcatggctcatcaatggtcccataatatgattgtcttgggcaaaagagtcttacccatgttgatgttaacatggaaaagacagtcttctgatgctgacactttatttgctttattaattcatgttttagattagtcttttaattacgttgcagaaatgattctttttttttttgagatggagtctcgctctgtcgcccaggctggagtgcagtggcgcaatctcgactcactgcaagctccacctcccgggttcacgccattctcccgtctcagcctcccgggtagctgggacgacaggctcccgccaccacagccggctaatttttttgtacttttagtagaggcgtggattcaccgtgttagccaggatggtctcgatcttctgacctcgtgatccgcccacctcggccccccaaagtgctgggattacaggcgtgagccaccgcgcccggccagaaatgattcttaaagcatccacatgtaaggacaagtctgcctgatgctggatgcaagcactgctgcttattattgggaggagtcaaacatgactctcccatggtagaggaagggagggaccactaagggttgtcttaaacgtggggagactggactttttcccgttttctcccgttagacacataccaggtggatccgttattgtttttagatcaattcccaagtcttcagaaatgtccatcattgaaggtgaatatatgatgtattccagagggagatggagactcttgctgtgttactcagcttgcatttgaacgccagcagtctcatcttgatgctatgccttagatttctcagctgaccaacaatttgggagattttgcattttcaagaaagaactttaaagaaaagattttaaggtgtattcggttaattttaattgagagtaaacaagttgaattttctccactgtgattttagtaaatagtaaatcatcaagctcatacagtccttcaccagaaatagatgagtctgtattttaggggataactgagcttgtctttaaaatttattagtaatgagacacacattctgaggtttcttagaaagtgtacatgaagaaataagatatctagaggcaattacagagttgggcttcaaaattacttttatgaaaagaaacaacatttgtcatttttgtttaaaatcttgatttatcacattctgagcagagcttgaaatgttgtgtttttattttacctaacagaatgccttgcctgcaggcaagcagaatgttggattaaaacttttaatactctagggcaaaatctgctgattttaataagagacaaaggctcatttggatctttctgtcattataaaaacaagctgagcttctgtttatcatgttcattgctttaattctgggcgcatggcattggaaaaggagatggttaccagggcacacatggcctgaaatgagcaataaatctgaggatctgtcaacagaagagcttgctgtcacaggtaattgtctaactccatcttctttcatctgtagccaagaagatgtcaaatgaatattgttgacaaatgtatcactttatgcaaatggcttaaaagaaaaacaaagtagaacttcacagaaatactatcagtgaggtcgtctgtctgtaaaaataaaagtagttcaccttgattgaatccttctgtcacttcatatgtatcagtatatttaatcctcataataacttattgctttgggtatggttactgttctcttctaaagataagaaaacacaaagttcagggtgataaaatgactaagttagcagattcttgagattttaccccaggaatctgacttcagaacccaagctatcattgatacattatgctgctttttatttataacaaatactaagacatgaccttttcccttctgacatgaggatgagagagcaggtcagaggccagtttctgacatggaatgccaccaacatgtaataaccaggcatgaagcaaatgggtccaggtgtgaggaaaggtagcaatcataatgacacagagatgtgaaaatccttggatttgtagaagaaaaacattgctgaagcatatattattagtacatgtgttttatcttgtagaccgccattttctttatacattgtctgatttatcagggcttgatagcattatggaaagaactgagagctgcagcagagattggtttaagatcttgcctctgctctggcatctaggtaattagctatataaacttgagccaatgatgaaacttctcttagatttgatttctgcatctcctaaatgggcataattaccgacactttgtagtgcttttgtgagaatttcagtgagatgatatttgcaaagattttttcaaagagatctaagacgttgataagtaatagtgtaatcttcatcattagaatcatcctattatcatctagtcaggctgtgacagcgcacgggagttgtgtgtttattgtgtaaaaatgactcaccatgacagtgatttggggctaaaaaatgaggataattatgatctctaagctgcaaatgtccatgcagagtgaaggaaagagttgaactttttcatttttttcataatttagtcattgttctcgatgagtttgtattaaaggagcaaaagcttctgccccaaatccatccaccattcattcattaatccatccatccatctatccaatcatccacaactaataataggaaataaaatatatatgccaataaaaatatttggcatttgataagattccagaatgaaaatgatgcctgatttaagcataaatagaaattgctgaggggttttaagagtaattttcatgtatacattcagttatttatttagtagatattatttagctaccaatttcataccaggcatggtgcttggtgcccagggtataattgttagcaaacctagagatggctgtacttgatctcatgcaactcctaggtgattcgtgaaatacattaggtctgcattttaagtgattttgtggtgacagtgtaaaccacatagcagacagagtagaataactatggaatgtcagggaggaagaggtagttgcaatagcccaggtgctattttatgaggagttgaggtaaggcagggagatacattggtcagaattatccacaaaaatagatcagattatggcctcatattttctggttagtctatatgctattgtattattccatttgcattgcaataaaggaatacctgaatctaggtaatttttaaagaaaagaggtttatttgccttctgcagacaagaagcatggctctagcatctgcttctggtgagggcttcaggaagctttcaatcatacaggaagaagaagggggagcaggtgtgttacatggtgagcaagggcacaagagagaggagaggagatgccaggctgtttttaacaatcttatctcctggaaatgaatacaatgagaactcacttattactacaaggaaggcaccaagccattcatgagggctccacccccactacacaaacatctcccactaggccccatctccaacactgaggattgctttttcaacatgagatttggagggaacaaatattcaaatgttatcagctaccaacatggcatttatttaataagaagaggtataatgtaggaccatattcccttgtctaccttgaatattcaaatttgtggttattttcaaatgatgttgctcagaacagtagaaatggaaatagaaccaactctcaatgagatagaatagatggatcttcaaaatgaaacagtgaataattgtcatggaaatgacagcctgggatgcacacaaaaggaacaaatctaatttcagattgtgcagtcaggcaacagagctaagcaaaaatgaaaagctttgtgaaaatttcatgtcatagtctaattttgcatgtaaaatatccgcccactttaagaacagataaaaagtgcttaaccttaacaaatctgtctctgaaaacttttctgagaggtcctgataagatgaatgagatttgactattgggctattggaaattagcctgcttgtctgtgatgctccatatttctaaaactgtgcattgaatttagcgaacatctactaaaaatccagcacagtgtgagtgtcatagacaatacaaagttgaataagacttggtttattttccagaagatctcagaatttactgatatgcaaatcagaaaggtagaataacacagtgctaaacaggatggacttgaagtaagacatccctgggttccaattgtaaccgtccaacaggttcattttgcctgctgctcagatagagccgatttatcaagacaggggaattacaatagagaaagaattcaattcatgtggaggtagctcaataggataccagagttatgttactgaaatcagtctcctcgaaaatttggagactacgattttgaaaggatagattggcaggtaggggcagagggagtaaagattgctgattggtcaggttggagatgaaatcataggaagtcaaagctgtcatcttgcactgactgggttcctgggtgggggccacaggaccagtgagcaagtctggagtggagccattcatgatcagaaatgcaaaatcctgaaaagatatctcaaaaggctaatcttaggttctgcaacagtgatgttatctgcaggagtaattagggaacttgcagatcttgtgcctaatttgttagtcctataaaggcagtctggttcccaggcaggaaggaggtttgttttgggaaaaagctgttatcatctttgtttcaaagtcaaaatacaaactgagttccttccaaagttagaacaagggcagcttggaggttagaagcaaagagtcggttaggtcagatctttcttactgttataatttttcaaatgatcactgttataattttttcaaaggcaatttcaaaatcccagcactttctcctaacattagtgttcataaggacattacaaagttctccattaattcctggttttgctatatctcaaatgaaaataatattagtattgcttaagttttttattctgcataactaataaccacaaacttagtggttattaaccaacaacatttattatctcacagtgtcagtgggtcagaattctgggtacatctggtaaacttggtcctctcctcaagctcccaaaaggctgaaatgcaggtgacaattgagccggcttctatctggagcttgaggtcctcttcccaggtcacacgattgttggcagaatttgtttctttttggttgtatgcctgaggcccccacttgatggctggctgtcagctggggcctgcaaatggctcctgaaggcccccgcggtcttggccatgtggttctctcatgatccctctagccacaaggcaactcacatctttaaaaccaggaggggccgggcgcggtggctcacgcctgtaatcccggcactttgggaggccgaggcaggcggatcacgaagtcaggagatcgcgaccatcctggctaacacagtgaaaccccgtcactactaaaaaaatacaaaaaaaaattagccgggcatggtggcgggcacctgtcgtcccagctactccggaggctgaggcaggagaatggcgtgaacccaggaggcggagcttgcagtgagccgagatcgtgccactgcactccagcctgggtgacagagcgagactccatctcaaaaaaaaaacaacaacaaaaaaaaacaaaaccaggagggaaggttctccactgtctaaacctccagactaacaaacaaacttagcttcctggtattctcccttttcaataacaagtcaactgattcaggactttacatctgttaagattccttcacttttgccatattctgttgtttagaagcaagttgcaggtttggtccacagtaagggagaagggattatcatggagcagagaatatgtagtgaatcttagaattctgtctgccataagtatttacttcactgttgttttcttcataataaaatgaggtaatgtgcatgtctggtgcgtatcaggagatacacaagttacttatcttcgaaacccaaaatgccaagtggctgaaaaatacattattgtggtcaccagcagaggtagatggagccccacccaaagtttggttcagattttgaggctaatgatgccacacacacagcaggcgggtttggacataggtgaaataagccaggcacaggaagacaaatgtggtttgatttcacttatctgggaaactaaaaaaggcaaactcacagaagcggagagtagaatgatagttgcctgcggcaaagggaggagaaaaggaagatgttgacaaagggtacagaggttcagtaacgcaggatgaaaaagttctggagatcaaacgaatatcatggtgattatagctgtatttatgaaatgagtggggatcttaagtattcttagcacaaaacaattaactttgataagtgatgaatatgttaatgggcttgataatagtaaccattccaccatgaacgcttgtatcaaaacatcacattgtgtgccttaagtatacaaaatttttatttgtcaagaatattttaataaagctaaacaaagggtgtggaaaggctaatttcttatataactgaggtctctaggagagcagggcaggcctctcaagcaggctggaaatggcttgagagccaggatagcgactggcctgggtttctcttctggctcagggtggggccagagtgaaggttcctacacagacacaggcttgcatggtttgcatctccaggcagaggctgaaagtgggaggactgaggctttcctatcagacggtgaagatataggcaggagcaaagtaggaaggatggggcttcaaagctgtcagcagtcagacatcaaaacatagagtcagactccttattacccacgtgttacagcaagactgagcctgccagctaagagctggcgtggcagcccggcacagttctatgtgatgcagcttccttctatctttctgctgttctattctcagcatcactcttccttttctagggtcactgtatgatgcacaatggctcctgaaactttagcctttttatccacatcccaggcagctacaaagaggaagaagaaaaagtctaaaaagtggctttccccagctctctgtccctcatttgcaaaacttcctggaagttcctccaaataatgtgggctcacatcttgctgcgtggccatgacttatgagagacggctaggagccacaagggagaatgggaaagacaggcttttagctaagcacagtgccaaccctcgtgatataggagtttggtgagggagggaagtctcttttttggatgtcaattaccgagcccagtgactggcattttctagaaatgttatttattttaaaatactcacatagagcttgttaattcccccctccccccattgttatcctctcacagatcatggtccatttgtcaaaactaagaaatggacattggtccgttaccattaaccaaactccggactttatttggatgtcaccagcttttcctctcacgtgtttcccagattgtgtttagtcaacatgtctccttagtctcctctggtctatgccacactttctcacatttcccttgttttttttaagacctgtacagttttcaggatgactggtgagttatctagtgagctgtctctcaatttagaattttctgatgtttctcgtgattagagttttggaaaaagacacccaaaagccccttgtgcaaagtccttcgtgcaaagctgttcttgtcccatcatatgaaaggatatgtggcattcacgtaagattgtcgagatattcaccttgatgacctacctggcaaggtggtgttttcaggtttctaaagttgctttgttttctcttttccctctttggaagtgggtcactgagtttagttcgtactcagtcgtgtgtggttcagggagggcataaagctctatttcctacagggaagataactatacatattatttataattcttcagtaaaataatttgtctctttttcctcatttattcactcatttatattagtatggattatgcatttttattttatactttggcttataatcaatactatattgtttattgtattgctcaagtagttccagctttggccattgggagctctttcagctggctcctgtgaccttttgatgatatgcccccatcgttttgtgtttttttgagccctttcttaacgtacggcactgtaagaggctgctggttcgccttgaactttccctgccccagccctagaatcagccatttctctgaggaatcttcattccttttattagagaatggtactaaaaactgaagtctggtcactgggtgcactttgagtttatatttgtctgctgaatactgacatggtggagataaagttccatataacaatggatatgacattcaatggagactgatagtgtgataacatgaaatgtgctttgtgaatgacgtcagtgaatttgtatacacaccatctcattttattctcctgttagctcaactgggagatatattaaataacacaattccccaactaatgcatgagaaagtggagacttagatgatccagttacttgcacatatcacacaacttgtgattggcagtgataaaccttgaagccacatttcttagctctccttttcaacacaacatgctgtcttccaaagataaatttttttacaggcttgcttccaaggattcaagaaagttatctattttatttataaatgagtcaacaagcattattagtttcatctattggccagacatagttctaggcatgttggatcaggcaatgcaacagaaaatttccccttcatcatgtagttaccgcctcatggagaagaaagtcaatacacaaatgaataagtaagtaaataatttatggagtattaggtattgtgcagaaaacaacacttgccagaagaatgatgaaaagtggctacacttaacacgtggccaagaaggccacacgtgcattaggacatggctgacatgaagaaccagatttaaaatgataaaagagcaaagaaaggcactccccaaggtcggaaggggcttggcagtttccatgaatgaatggaggccaatgtgatcccacaagataactgaatgaaggccaatgtggctgagccatgaagactctttgggtgtgtggaagtatcataaagtcagggaactatgcagaggtcagataacaaagggcctcatagggcatgttaaggaggttatattttgttttattttcttatttattctcagagcagtgggaagccattggagcagttttggtaggagagagacacaatctgattttcattttaaatgttttattcttacattggtgtggaggatatatacaccatatatttcatcaaaattaagatacaattgattataatagccactcttgtttttgagatgttaaaatttgaaaggaaaaaaagaactagtgcaatattaaagtatcatcaactgattgtaaaatgcattccaatttcagaagtgttacatgtgaaaaaaatgtacatcttagaatatagaaaatgcagacacagttgacaagtgtgcaggcagggaggcaaacaggagatgactgcagtcatgcaagaggagtatgtcagtgactaggctggtgtcattgagctggagataactgagcagatttggggtatatgtgattggaggtagaatgggctggcattgttgacaaatcagatatgggggtgaaagagaagaataacttttaggtttttggttggaacaacagaatgatgatgctagctttactgggatacaaaaagacattttgaaatgggtcttcactcaacttttcacctcatttttggctatatgaaagttggcatgcctactagacttccaagtgagattgttgagcacatggttgaataagaaagtgtggatgcaatagagacaggtgagagcttaggctattgattagagagtcatccatatggggtaaagtcatgaaattggatgagaagagactgaagagcaaagatgattaaaaaccctagaattaagccctgggcatacaaagatgattaaaaaccctagaattaagccttgggcataggaggagaagccagcaaaggaatttacaaaagtgaagccagcatggtaaatggtgacaggccaagtttggcatcaccaagaagggtatgaagagggaaaagggaagaaatactaattacctggcatgcagttgcaaagttgagtttgatggagaaagaatagtgactctgggctttgcaacatggagattatcaatgacaccctagccttgtgctacatttaatatgctgatttacaccttgaatgagagcatctcaccctttcaggaattagtaatgctgaatattgactttgacaatgttcccctttgtgtggctttcctctctttcacagctgtaatgatactacaagataccgaatatttgcacctttattttttaaaatgctaccaatggcacattttaaaccaaatttgaaattacttagtataaatgataaaatcaaagaattaaaatttggacttgctttatatcagagttaattattagtttatacagtcaataaccttttttttcagaatatgtttacaggagttttcaaatgtgtagaagaatgattttcttttgaaaattaaccatactttgggtgttctgggtttggctaattatgagaaattcctctattgaccattctctgagtattttaaatttgtataattatgaaacgttttttatgggtgtaaatataggtaccatcatcagggaaagagagctttatccaagttctatgttatggggaagtaaatgtttttgacatggtactcttcacttatctggaacatcagtcacatcatgggggtaattagagagtaaagagccactgtggtgggtttattaaaactatatattttcataaaccatttattttagatttaattttagacttatgggaaatactgtgaagatagcacagagagttcctgtatatgccaagtacagtttccctgattaacattgtacagtaatgtgcacactattgtgaagttattgtcaaaactagtaaaccaatattgttaatattttattaattacagtccatatttcattcttattgtcttagtttttaccttatatcctttttctgttccagaatcctattcaaggtactacattgcgtttggtcattctgtctccccaggatcctcttggctgagatacattctcagattttctatgcttttgatgacattgagagttttgaggtacatgactatggtatttggtagaataccccctccatttagattggcatgaggttttcctcatagtttatactggagttttagatttgggggaggaagaagtaaattgtcattctcatcatatccagggtacagatcaccaacatgactcatgattgttgatgttaaatctgatcacctggctgagcgaatgcttctcaggtttctccactttacagttattctcctttcttcctttccatattgtactcattggaagaaagtcaccatgctcagctcattcttaattagtaggacgttatgctccacctcactgagggcagggtttctccatcaattatttggaattcttctgcacagaagatttacctcttctctcctgtgtatttgtttgtttattcatgcattcattgaggtagtcatttactcaacagtccacatcagtgtggattcacagacatatactttatactttgggctataatccaatatgacttatttactatactgctgtaattcattcttccaggtttgcctttggcagctcttctagttagccactgtgtccctttgacacgtctccatctgtgtgtgtgtgtgtgtgtgtgtgtgtgtgtgtgtgtgtagcactttgttacttcctggtactgcatgagcttcatgttgtatgttaattgtcgttgtactattaccagccatttatttgaggaaacttggctttcgttttcaggcatggcgttagaaaccaatatctggcttctagttgtgctcattactactgggatgtcatttattttaaatgatctcagctgactgagcaaagaaatatatatttgtatactaagctgtaaatatatatatttctatatgtaagcctctgtgtataaatattaaactaagcataagttcatactgatgtcttcaactgttatccattaccacgtggatcagtcttgtttctttccattgcctatctgtatattctactccaaccatgaggaagctagctcccaccatccaccatccatttacctaattgttcagttcccagtatacatgtacagtggtttcaaaatttttaatataagaactctttgaatacatatttatttcattttgtgcatctaatgttggttatagaaagacatttttctggctgggcgcggtggctcgtgcctgtaatctcagcactttgggaggccgaggcgggtggatcatgagatcaggagatcgagactatcctgaataacacagtgaaaccccatctctactaaaaatacaaaaaattatccagatgtggtggcaggtgcctgtagtcccagctactcgggaggctgaagaaggagaatggcatgaaccccagaggcggagcttgcactgagctgagatcacaacactgcacttcagcctgggcagcagaacgagactccgtctttaaaaaaaaaaaaaaaaagaaagaaaaggaaagacattttttttatcatggttaatctgaaaaccagcgtgcataatatgttgaaatttactcgacttaaataagaattgaaattttttgctttaaattttatatttgtgaatataatttatgtatatagttttttatttttacctaattatggattcgaaatagtcatatgtatgtatgtaggtagtttttaaaaataagtagtaatgcatgcaaatatcttaaaagtaacaaaagccaaaatttttcttttaagtaacatgaaacagcagtctgcctccctgctccattctttatacccgctctccaggaaaaagtcatattcagtttttcttttctttttttttttttttgaaacagggtctcactgagaagtgcagtagtagaatctcaattcactataaccacaacctcctgggctcatgccatattcccacctcagcctcataagtagctgagactatgggtgtatacaatcatgcccagctattttttttttcctagtggtggaggtctcgctatgttgctcagggcagtctcaaactcctggcctcaagtcatcctcccaccttggcctcccaaagtgctgggattacagatgtgtaattgcccagccatattcagcttttcaagcttttttttccttcctatgtttacttcaacattcctaaataatatgcttatactcatatttcttcatataaactttaacctgaaaatttatatctaataacgtttttgtgaggagataagaaaaaacactaagatatttaattggttcttcaataaattttgaccaatctttttgtatttagccctacccacacaccttgcttatagagacaccaggtatcctttcatcatagattcttaactttcagtactcttaggttggatatgttgttgccacttgctcaccagctttctactttccaaatttgattaacgtatttcttttgctcttcttttatttcttcttgtttttataagtgtatgccttttgaaatgactttactgctgttttagtggggtttttggagagcagaaataaatgcctacatttaattcacttatgtgtaactagaagttagaagccagttttaaaaaatatgcaagtttacttataagtaaattatgagatttttttggtgatattacctgtattatttttattatgagtacattaatttaaataacatattacacaggaaaatgcaagtttctccatcatgctgccttacccctcctactcacccaagtgctgctctttagattggcataccttttgttggattgattaatttttgcattgttatacatttttattcacttgatatatattaacctatatcaatttcctcaattgctgcatattattctattggtcagatgtatcgtaacttactaattcatgatttatggccaattagttgctaattttttaaaaataattttacatgggcatcttttaaaaaagttgaagtttagataaaaatggaagtggtgaaagctaaacttgtaattgttactcataggcatgtagatttttaaaagaagttaatcacattctgttagctaatgtagtacaatgacatttaatgagaaatgttttcctaaagacctttcgtgatccccaaatcacacaattcaagattatttttgcactaagaataaaagtaaagtgtgtgggagtatattttcagatcatataattctgcaaccattgcagcatatgatttgtcattgttgctttaaatttttacaatatgattgttaatattttacataacattctttaagatcatagcacagcatatcacttattttttttaaaaagttttaaaaattttttcttgattttatttattgagtttttttcagacctctgagaagctgtgaattatataacagcatggcatatcattctgattatttagaatcacaatttaaaatcaaatttgttgtgccaagttatcacaacaaatatcatttattttcaggtatggtttctagtgttagcacaaaacaaacattccttattggatacttggaatgcatcattatgagatctgaaaagagtttaaattataacagtctatattaagtgatatcaaaagagtcacgaattcatttataggaatttattttaaaaacattatgtccatataatctgtccaaagtttggcactcatttctgtttaccagctagagagttggataaccatgaagcaagcataaaagctagatttgcaactcattcaaccagctctaagatgatagtgctgatggtttcttgagatattcacattatttaaaattttgagcctaagttgagattcattaatattttaatatcacaatatttcaaatttacataattcatatttgagttaaatgtgatttaactgtatacatacacatacagacacataataatatatattttaatatatatatattgaggtgacattatccattatatttatatatttactgtaacaactcatgtctaataataagataataggatgctgtgatatgaactatttgacatgattttacttactttctcactgcttatgaatacaacctgactttagaaatcaatttatatgcgtgtatagacatatacatacatacatacgcaagcattatatgtatgttgtgttgcatttgtaagagtgctaggcactctaattttttagctaattcaattactatcacatgtggcattaagcattgtgaaggaacagacttttaaagcgattataagtccattaaccatccctacctccccccaaccctagctacccttcccagcctctggtaaccatctttctactctctatttccatgagttcaattattttgattttcaggtccaacaaataagtgagaacaagtgatgtttgcctttatgtgtctggcttattttatttaacataatgatcaccgaaaattaaattaaaaaaacaaagaaaaacagattagacaataaaaagaaatattttagttagttctaaagaggatttatctttagtctatttccaagaaataatttaaaccatctatattattgttaagtcttagcactgacttgcaaatttatagactacaatcatgtagcttttaaccatttattattttttgttataattttccagtattttaggatttggggagatgaccatatcaataatcaaataatccaaaacattaatcaaagtatatttaatagttattacaaagcccatgaatatttttgtaacatatcaaagtaaatattattaaataaaagatttttaattacagattttgtcttgcagattaaaattatttaatttgaagcatctcatctgtctctacagagctacatgtaatccagtgttagcattcaattttgttttgttttgttttgttttgttttgttttgtttatttgagatggggtcttgctctgttgcccaggctggagtgcagtggcgcaatctcggctcactgcaagctccgcctcccaggttcacaccattctcctgcctcagcctcccgagtagctgggactacaggcacctgccaccgtggccggctaattttttgcatttttagtagagacggagtttcaccgtggtctcgatctactcacctcatgatctgcctgcctcggcctcccaaagtgctgggattacaggggtgactggccagcattcaattttccctagatgtccaatcatttgagatcatcgttcccatttgtatgtaacagtgtaattataatgactatgtttccaaaatctccttctcattgtctctggacgctccagtcgacacttacttttattctgtactttcactgaattctcaatctcattccaattctaatatattattctctttctctggatcatctgacccaaaaggagaagaccaacctttttttaaaaaattttccccaaaacatgattgtaaatatctgtgttaagtaggcatttctttgtgatttgtggttaatggaagattactttgaagcatagcataaaattgagtattatacaaccttgttcactgaagataattcagcctctttcaccatcaccaatttctccctgatcaacttttccccagcctccctgtgtggacaacatgtgacccgcattctattttctgtttgggtccccttcataagactctttctctccaaacacagccatcagctgacaaaaaattcagaattctccttgcacagtagttctcacatctctaccttttcagaccagtccattatagaaagaaggtctctagaatggcaaattttacatgtcaatttaactaggtcatgaagtgcccagatagttagtcaagctttattctgggtctttgtgagtgtttggggggtgagactaacatttaaattagtagattttaacaatgagttagattaacatttaagtcagtacagtaaagttgattgtgctccataatgtgggtgggactcgtccaatcacttgaaggtctgagtagaacagagaccaatcctctcccgggtaaaatagatttttccagctgactgctttgtgatttgttataaacccaatgcttgaactctccagcattcatatattaaaactctaatatgatggtattaggaagaaggaattagggaggttactaggattatatgagatcaccaggctggagccatcatgaatgggattagtgtcccgttagagtaccaagagagcttgcttcctctctccaccttgtgagggcaccactagaagactgttgtctatgaaccaggagttgggccctcactagacactgaatctgccagtgctttgtcttggaattcccagcctctagaactatcagaaataaaagtttgtttaagccatcgccatgcagtttacagtatttcattatagcatcctgagctgactaataagacttcatctgctgcattgtctctccctgggtctcttgcaccattaccagcctccataatcccatgagccaattcttttattttgtaaattgtgtggatacaggaggtgtatatatttatgggatacataacatattttgatacaggcatacaatgtataataatcacatcagagtaaatggggtatccatcacctcaaccacttattctttctttgtgataagaacaatcaattatactcttttaattatttttaaatgaacagtattattgactgtagttcactgttgtgctatcaaatactagatcttattcattttctctaaatatatttttgtacctattaaccattcctacttcccccgactacccttcccagcatctgttaactatcattctgttctctatctccatgggttccattgttttaatttttttagcacccacaaataagtgagaccatgtgaagtttgtctttctgtggctagcttatttcacttaacaaaataaccaccatccatgttgttgcaaataacagaatctcattcttttttattgctaaatagtactccattgtgtatatggactccattttctttatctattcttctgttgaggaatacgtatgttgcttccaaatcttggctgctgtgaatagtgctgcagtaaacatgggagtgcaggtgtctcttcaataaattgatttcctttcttttgggtacatacccagcagtgggattgctggatcacattttacatgtcaacttaactaggccatgaggtgcccagatagttaagcaagctttatactgggtctttgtgaggttttttttttttttttttggtaggggggtgagattaacatttaaattagtttaaattttaactaattttttagttttttgaggaatgtccaaactattctccatagtggttgtactaatttatatctccacaaacagtgtacaagggttcctttttctccacatcctcaccagcgtttcttggtgcctatctttttgttatatgccatttgaactggggtgagatgatatttctttgtagttttgatttgcatttttctgatgataaatgacgcttagcaccttttcataggcctgtttgccatttgtgtgccttctgttgagaaatgtttattcagctctgttgcccattttttttatcggattacattttttcctataaaattatttgagcttcttatatatagtggttttgaatcttttgtcagacggatagtttgcaaacgttttctcccgtcttgtggattgtctcttcactttgttgattgtatctgttgctgtgcatcatgaaccaactgatgtgtgcatcgtgtgtgtgtgggtgtgcgtgcgcgcacatcttattggttctgtttctctggagaatactgacgaatacaatctcttcaatcccctcctatgacccacgaagctattttgctaaatagaggcatctgctaccggctcttaaatttgcaaactttaatattattgtagtcttagttatgtgcactttctcgtcaatctctaagggaaaagggagctatgtagcaatttattttcacactgatattaattttgctgactcccttacctacctccctgcctgagtcaagaaatgttcccataagaggttgttgttttttaactgagcttagtttacatgtttttattttaaagagatatttattctattattacatttattctcatgggttgccttctttaaaaaatgagtgtctaatttaacagtttaaatctaatgagaaggttgcaggtgctgagaacttgaaaaatttgattgtgatttgtccacatgcagtagcacattctacaattctcagagtcccagaatcaggagaaaatcaataaaatgatcagcttgtatcactcagaaggcaatgtcgctggaccataaaaggcgagtcccagtaaatgctcttacattatctccttctaatacagtgatgtagagctagcagtatagtacaggaaaataactggaaatgtattttgttaatatatttttgggagaatggtagtatctgctacaaattttagtagtactttaaagtagactttatcaacctcagcattgttgagcttttgaactgaatagttccttgctgggggaggaggagaagaaggaagaaaggagggaaggaaaggaggaagggacggggagggaggaaaacagggagggagggaagagagaaagttagttgtaaagggaggtgcagatgaaagtccacttaaatgttagacctaaaaccataaaaatcctagaagaaaacctaggcattaccattcaagacataggcatgggcaaggacttcatgtctaaaacaccaaaagcaatggcaacaaaagccaaaattgacaaatgagatctaattaaactaaagagcttctgcacagcaaaataaactaccatcagagtgaacaggcaacctacaaaatgggagaaaattttcacaacctactcatctgacaaagggctaatatccagaatctacaatgaactcaaacaaatttacaagaaaaaaacaaccccatcaaaaagtgggcgaaggacatgaacagacacttctcaaaagaagacatttatgcagccaaaaaacacatgaaaaaatgctcatcatcactggccatcagagaaatgcaaatcaaaaccacaatgagataccatctcactccagttagaatggcaatcattaaaaagtcaggaaacaacaggtgctggagaggatgtggagaaataggaacacttttacactgttggtgggactgtaaactagttcaaccactgtggaagtcagtgtggtgattcctcagggatctagaacaagaaataccatttgacccagccatcccattactgggtatacacccaaaggactataaatcatgctgctataaagacacatgcacacgtatgttgattgcggcattattcacaatagcaaagacttggaaccaatccaaatgtccaacaatgatagactggattaagaaaatgtggcacatatacaccatggaatactatgcagccataaaaaatgatgagttcatgtcctttgtagggacatggatgaaattggaaatcatcattctcagtaaatgatcgcaaggacaaaaaaccaaacaccgcatgttctcactcataggtgggaattgaacaatgagaacacatggacacaggaaggggagcatcacactctggggactgttgtagggtgcggggagaggggagggatagcattaggagatatacctaatgctaaatgacgagttaatgggtgcagcacaccagcatggcacatgtatacatatgtaacaaacctgcacattgtgcacatgtaccctaaaacttaaagtataataaaataataataataataataataataataatataaagaaagtccacttaacatagacacttctgtttgtggtattgctctggttttaatgtccttcatatggaaacatccatcaattaaaaattatattgaactttcatgcttaaattatttttttttcagaattgaaaaaggacacttaaaacattttcattacaatattcaccattcctttgggaagtgagttctcaaagacatttgaatgttttcctcacctacctatttgggggtataaggcaactactgtaagaaaagattattttgaaaaagaattctaggtccattttcctacagggaattgtgagagcttatgactcattcctgattactcaaataaaagtcattcctttaaataacttacgataacgcccttaatagttttcacaggcaacttcaaatgttatttttttaagaaggtgaagatgtcttatttctttctttcttcgcatagatttatttttcccatttacctctcatagataatgtgtcatatatttccttcataagacgtataaatctctaagactacctttggagattttaaggatcaaaaaagtcaaataaaatcaatactttatattattatatgcaaagttgtatgcggagtgctgtagtggatacccatttctgtgagtcctcagagagatttcaatataatctgaaaggtgacattaacagcaaagttgggaatgtgagagaatgaagggtgggaagtgtggagagaaaatgttaacagctaatcacaacagggcagaaaccacgagtcggggtgggtgtggagaagcatgattattggccaaatatatgattttcctgctatgaaattttgaagatgctaaatttaattgagatttgaatataattaatatctcacattgaggtaggttagatagggtgttcatagcctccttcagcagaaaacaagaaacttgtcaaattgatagaaagaacaaaccacccacatgtacccagacgacatcctgagcttgtagtgacaaaatcctacagcaaagaggtagaggaacggaagggaaagtccccaaattcacagaagcacagaaaccctgagcagcccgttctgatccgctgtcagagtgtgtgtgttcgctgtgcaggcaactctcctgctcactcttactttagactcactcacaaattcttttgtgttgcggagagaagagcctgaatttgtgcacagacaatggaaatatctttcccctttgtctcccaatttctaaacccactgtctctgcagctaagtgatatccaaatttcttcgtggctcaaaatagataagggttccaacatttgggtttaggtaatactaatgcaacaagttgtaaaggacacactctgagttcccagaaagcgattgggttctgaaatacacacatgtctgaaatacacatttcaaagagtggagtaaatgctttacatgtatgaagttttacatttttctttctcatttggataagcctgaaagatgtgaaaacatttcttagttgtcatatcaatatgccaattattggcattctcttcagtatttgttgtatactatggataattgttgaccttttttccccccaaatcacaagttcttctgagaatgtccattctgtgttcttcgtgaaagtgaaataccggtttcttttttattatttctttctaagtgtgaatttttcttgtcttttatttcacacaactgtgaatgtgtcttctcttttattgttatgctgaagttaatttttttaatcctttgcctccaaaatgaataattctcccccaagcacccaaggaagtggattttttcatgtgttctgtgtagtgaatgtcttttatcccccacttcttgaaattcttctcttttttttttttttgctcaggtaacatttatctactttgtctcttccatgccacaaaatgatgaattttgaagggtgattttttttccacttttctgttaagtgaggaagcaacaaaaggacttaaagttgcagttataacactcttgccagtgtcttcttttagaaattcatgcaattatttacttctgtgaactcttactgggttggctgattccttccctcttggtggtactcctgaatgtgtatttctaagattaaatataactctatatttaataaacataaaaggctttatttaaacattgaaaatattctactttctgcataatttttaaacttacaatacactgctaatgggcttataatgactaatggtaagcttattttttaatgactttctgagagattacatttctatttctaatttttctctggtttacatgataagaactggtcaggacaactcttctacccggtcatcttactcttatatacagacatttattcattcaccaaataattattgaggacctattatgtgccatacaagaggctagaggctgggtgtaagtagttaattattgagatctggccccactcctctggtgttaacagtttagttaggcagacagtcttgaaatcaataaaccaataaatgatccatgcaactgaatacaccctgattttccactggagggagacgcaattccttttcaccctctacagctatctgttttcccatttctcacaataattattgctggtacttattgagaggtgactatgccagagacttttgttatgttttttatttacattattttgtctgatcctcagacaccctataagatctaacattatatgcagtctatagatatggaaactgagtctgggaatggctaagtgtcattgtgaaagccaactgtggagccaaagtcaaactatggacctccttgagcctggatgaattcacttgactttttcctgttactgccagaaaaataaccccttcctttttctaacggaaaccttctctctccagtcaatcagtcaatcaatcagttcaaggactttttttccccaaaaccactaatatgcattttgggcaacttcaatggaagttacctggttatttatttattttttagtcagtcatttatttattttttactcacttgtatgcttgggagtccagtagcacgaataagagtttattcaccacagatgctttcaggtagaggctcagtaaatatttgttgcattaaagaatgtgagaaaaggctgggtgtggtggctcatgcctgtaatcccagcactttgggaagccaaggcaggtggatcatgaggtcaggagctcgagaccagcctggccaacatggtgaaaccctgtctctactaagaatacaaaaattagccagacgtggtggtgcgcgcctgtaatcccagctactcaggaggccgaggcaggagaatcgcttgaacccgggaggcggaggttgcagtgagccgagatcatgccattgcactccagcctgggcaatagagtgagacttcgtctctaaataaataaacaaataaataagttaggaaaaaaacctatgattaagaaacatattcttatttaggaggacctcacaatccaaatgaacccaagaaaatctcgtccaatataaagcaaaataatgtgtcattagagggataagcacagagggataaaaaggaactattggcctggatttcaggcttagaagttaaagaggaatgcctaaaggtgtgaaaatggaaattgagttccaaagattaatttgataagacacgagaagtggtggaggagtacatgctaagatggtcatagccaattcagagtgtttcagctttgcgctgttgagatttgggttagggagttatttgtcatgcagggctgtcttgggtcttgtagaatgttgagcagcatccctggcctctatccactagatgccagtagcacatctcatgcctgagtggcaacaatcaaacatatctccagacattgccaaatattcccttggggctaaaatcacccctggtagagaaccactggcctgatatttaaacatatgtttcaatgtagttgtgaagattagagataagcaataagtttgagacccagattgaatgatgccattatcagaaggaagctggaatcaattaaaggaaaggttttgctaaagaaactaagggatttcactgtaggattgactcattgggatgatttcaaaaggagaacaacttcagatattaattccagaagaaacagcacttgagaggaacagttgtgttgtctacattaaagtcattcttgtccctctcccgagaactgtcacttgatacctctgaatatgtgtgtatgtgtttctatgtacactttattaacttgaaataagaaggcaggttgtgtcagacagttccagtgctcataagcctcaggaagctgtttctataagcactttcagatgcttatagaatgctctcctagcattgataacccattattttaataccttttattgaattctgtttcccccatgttcacatcaagtaagtatattcaattcagctccctaattactgagagcctgggcaacactaggtgagataaggtaaaacactgttcttgatctcagggaagcagcattgctcgagcacatgaggttggaagttacctaaatctgagtttgtatgttgttaattgacccttgtgacattactgaggttattcagcttccataagtgatggttttcttatctatagaatagggatgatactggtaacacagtcttagagctgtcaagatcgaggagtgagtgaccacagattgctgcacctgtgcccttcttgttgctggacaggggatcaccatgatttgcaggctactaggtaggtaatattagtgattgaaacaatagggccagagaagtccttttgaaactgtatggggtgggctgggcacagtggctcatgcctgtaatcccagcactttgggaggccgaggtgggaggatcacaaggtcaggagttcgagaccagcctggccaatatggtgaaatcccatctctactaaaaataccaaagttagctgggcgtggtggtgggtgcctctagtcccaaccattcgggaggctgaggcaggagaattgcttggatgcgggaggcagaggttgcagtgagccgagattgcgccaatgcactccagcctggagacagaaggagactctgtctcaaaaaaataaaaataaataaaaataataaaaaaatgtgtggggtggaatggagaaatggtgtcttagtaggaggggatccccaaaaacactgatagggaagagggaagggataggaaagaaaggcaactaatgcaaccagtgtaaaacatgtacctttgagttatcccattcaagggatgagataactggggcatttatacaaattctgtcagttattattgaggattttttccaagaagtgagaattatctggcatggtctgggtacaatgtcagacataccacatcatggcagagtgcatagggttgccagacataaaaattaatagtacaagatgcccagttaaatttgaattttgggtgaacagctattttttttctatttatataggtatggcccatgcaatatttgtgacatacatacactaaaatattacctcttgcttatctgcaattcaaatttaactgtgcatcctgcattttctctggcaactctgagtggattctggttgccagagaaagttcttaagcaaggatatgcagtttctggcagttgaaactcagactggcatgcgccaaaagggtaaggcttgagagaaaataggcgaggcaccatctgctcaccacattggacataagcatacgtgctagtgtctaaatagcatccataatatttgtaactggccatgaataccttggcttacactgactagctcagggatgggtatacgacagtcagactcagggtgtcagttttggtttttccctggagttattgagaatgatgtgttttcttttgacctcagtttctacattggaattatttaaacctgagacaaactttcctgatctcaggtaagaaatctcatatagcatgagcatcttagaattctgcctactacacaatcttaggaaggagctgaagaagggaggggttgggattaggagagaccaaacaattattgccaaagagtgagcagtacttttgcaccactgaattgtaacatagatacaatttacaacctcactaggtactagctagataacagataactctcttactacgtagttagcactttattggcttgaaagcagtaggcaatctcacaaggtatgaaaactatttctgtattaaagcaaagatggcaggcctaggggtgggcagaggaggggtctgtctcattaaatcctcagttttaatggtactaaacaggcaaaagaaatcaactatacaaaagggaggcctgtgattgacaccagcttcccccatttttccagggccccccaggagtgatacacagatatgtgtagcaatgaggggttgtcacactgtgtcaaaggaaatgtcgtctgccgctcagagcggaaggttttagagctaaagaaaacacacctggggtgcaatatacatactgaggctggcactaaatcaaagcatattagaggagtttttgcagaagtgaggctggtctgagcactgtcagtttctctgggttcccaaccaggcatgttacagaagaaattcatatcagccatgtggacaattcatctgttggtctcaaagcaactgccaaactgtctttggtacatgacagcaggaagaaatttccttctcaaatcaatgattcaaatacagggactcactggattggttaaagagggacgaagagtaaaggagatgaagatgtggagacccgtgatgtgaaaggcggaaggagctaagggagatctgatgaagacaattaaatgaactttaagcggctcatagagacacctctggagatttcagataagtcacctgtcaaaagtcattttcttacaggacacagttcactccctattgattatgacaggcttacacttgattccaagccctgtttccaaacttgatttttatctttgtttcttaaagcatcagcttatctcagataaaggtagagtctctctacacttgtgatatttaacatttttttttctttttttgccactgtaacacttaaattcacccttgccaatttactttttaaaaccagctctgtggacatatccacaaagaatgtacagacaatgggcacaaccatggcaggtctgagggctgtcacattgttaccacataattactgtttgctggaacgccacttagagtacatgcagcctgtaaccagtttgctaaataaataaccctttttaatttaaaaaacaatttctcggccaggcgtagtgtctcacacctgtaatctcagcactttgggaggctgaggcaggtggataacgagttcaagagatggagaccatcctggtcaacatggtgaaaccccgtctctactaaaactacaaaaattagctgggcatggtggcacgtgcctgcagtcccagctactcggaaggcttgagcccgggaggcagaggttgcagtgagctgagatcacgccactgcactccagcctggcgacagagcgagactctgtctcaaaaaaaaaaaataaaaaaacagaaaaaacctcaaacattaaggcattagcagacgagcattatcaaataacgtgatcttttttatctcccaatttttattttttcttttgaaacaaaaaaatactgcttttgtaatgtgaaaccactgtatatacatatgtagaattcaatttaaaaagcatttctaaaagggaaatagttggaaaagagcgtacatgtaaattacattctaatatctcttggcgaatgagcctacagagagattgttccatccatcaatagcatatgaagctgcctgcttcatttgaatcatctgagaaatgctaaaaataacaattctgttcctcttccctcccaccaccaggtgggtcaaatgctcaggaaaagtagaaaattgcaatggtagtatccacattttcaatagtttacagctttatcttcagtgtgcctttgatgaaatgactggagttggcaaaagtttgggtggtaggatggggtgtggtaatgttggtagtgctggtgatgcttaaagtacaaaaattattgctcaaaattaatctgaaggctttatctgagaagaaaagtataacagggaagttaggaaagcaaatcctactagttctcaagttttttcatcatattgtcatcagttatcaagaacatcccagtcactaaaaaattttcagactttataattcttgtattggctttccttttgatatgtgcctaattatataaatatttggccaaaatagaaataaaactgatgctgtaaatatctatataagtacaacatacatactctcagctaaattacctggaatatcttctggaaattgagtatatgtatcttttgaattaatatgtgataaaatttttttacaaatgattcaattttcttattatagttaagtactaagagattatgcataagaatggtactgctgcatactttggactttactatataagaaacaaatatattttttaaataaaattttaagttaaaatcctgaagccatattgtttaattgttaaaaatactgtcatagactttccaaagtagaaaacttaaaagtttcataaacatagatgaaaattatcataaccacaggagaggcaaaacatttttagatagggtaaacacacacaaaaaactagaaaataaaaagataaattggacttcctcaaaatttaaaccatatgcccttgaaagagaccattaggaaaatgaaaatcttagacacagattggggaaaaatatttgcaatgcctgtatttgaaaacatcttacatttagagtataaaaatgaattcttaaaattcaataagatgaccaacaacggaattttttaaatgagcaaaatattttaaaagaccttttacaaaacaaaatacataaatggcctatatatattatacataacgggatggtcaaaatcatttcttattagaggaatacaaactaaaatcactttgagataccactaaacaccctttagaagggttaacactagaaaagacacacagtactaagtgttaacaatgacatggggcaactagaactttcatatgttgttggggggaatgtaaaatgacacaaccacttttgaaagcaggtttgacagtttcatataaagtttatgcattaaccatatcattccacaattctgttctatgcatttactcaagaaaaatgaaaacatagatttttacatgattattcattgcagccttattcatatccaaggaatggaaataagtgcaaacattcctcaacaggaaataaaggattttgcttcatctatacgatgagatatcactcagcattaaaaaaggaatgaacttctgatatatacaactacatggcgaacttcaaaactcaaacacattatgctgaatgaaataaaccagacataaaaccgtgattttatttatatgaaattccaaaaaaagaaacctttacctagtgttacagaaaacagactaccagttgactgtgaatgatgttgaatatttcaaatgtgttttctgcatcaattgagttgacatgtggttttgttatttcattctgttactgtagtatatttcactgatcagtttcttacgttgaaccatccttattttccagaaataagtcctactttgccatgttgtataatccttttaatatgctgctaaatttgacttgataatatttgttaaagatttttgcattgatgttcttatgggatgttgctctgtagttttcttttcctatagctttttgtctggctttgatatcagggcaatgctggcctcatagaatcaattagacagtgttctcttaaattttaggacaaaatttgagaaggattaatgacagttctttaaatatttggtagtaatgagggcttctcttttttgggagatttttgatttctgattcaatctttcttaccagttgcccagtttgttgccgtacaattgttcataactatcttagatttaaaatctgtaaaatctgtagtaatagcctcaatatcatttctcattttagtaatttgggtcttctttctctttttattagtcaatatagctaaaagtttgtcagtttgtagcttgtttttgaaaaaacaacttttgggtttattcactttctgtattttttgctcttctctatttcatttttcactgcttaatctttattttcctcccttttgataaccatgggtttggtttgttctatttctagttcttcaagttgtagggtttgtttgtcaagttaaggtctttgttgttttttaatgtaagcattgaaagctataaatttaccccatagtgctgctttctctgtgactcatattttgttatgttgtattttatgtatcattcatctctaagtattttctaattttccttctgattttttctttgatctattggatgtttaagagtgttttgctcaatttatacaaatttgtaaaattttctgttttccttcttttattgatttataactttatcctgttgcagttgcagaagatacttggtataatatctgccttttaaaattgatacagatgtaatttttggcctaacatattttctatcctggagaatgtcttgtgcacatttgagaataatgtgtattctgttatacataatttatgttgttattgtgtatatatttgttagatctagtcggtttattgtgttgtccaagtttttaattttcttatttattttgtatgattgttctattcactattgagagtggaatattgaagtctccaattttattttggaaatatcatttcttcaattctgtcaaatgtttgtttatttggatggtctagtattaggtgtgcatatatttataattaattgctttatctccttgttgcattgtacattttattactattcagtactcttctttgtttctgataacctttccagctctaatgtctcattttatctgacattaatattgccacccctgctctcttttgattaatatttgcaaggagatcttttcatgtttttccactttcaactatttatgtatttggatctcaagtgagttgcttgtaggtggcatatagtttgatcatttcttaaaaatatagtctgccaatctctgtcttttaacaggagagttgaatccatttacatttaatcactgaaaaagagatgctcagttctgataaatgtagtaaatatttttattaaatttgataataaatgttaaaatatctagttgggattgacgttttctaatgtgccgatcagatgtagtttagtatttgcataataaatttaaattgactattttactccttggggtgatttccttttcaatatccttcgactcacagtagatttaatagaacagccttcagcattgacttattccagtattcttgttattattattattattaattttttgtattcttttagctgtgttctcctctctactttgtcacccttgacttccctggcaggaaagaattgttggaacatttctgaggtttgcatccacataccctcataattatcagaagagcaaatgccttttctggcagctttgttagattttccaagattctttattggaatttactcagaaaatatcttttcatatgtagatggcccatattagggcacatgctccttcctgaaccaatccctgaagtcagggaaggtgatgtgctcttattggcttaggcctggatgacaatcagtatggaaggtggaagtagaattcctggaagaacaaccaagccaatcctcaaagcatctgaagggctggatctttctaaagtacatgcttctggctcagctggttctctcaaatataatctcaccaggcaaaaatcaaggaaggggttggcagggctgtgatcttgtcaggaggctctgggatgaatccaattccaatctcattcaagtttttggcagaagttggtctcaaccagttgtaggactgaagtccccattaccttgctggctgtcagtcggggactgttctcaacttctagttgctgcctgcatttcttgactcatagcctcactttttttctatcttcaaagccacatctagaatctttctcatggtctggatctccctgacctcctgtcttttcttctatgcaatcctgcttatctgtcttctctttctgtatcacaaggatcatgtgattacattagctccacttctataatccaggataacctccctatctaaattcatgggtagtatcctcactttcaactgcaaactcccttcagaagaggatgcagtgctttctgaagggtctaagtataaaacctcaaagatacttttttaatttttaaaatgattaaataaaaatatatctggctttaaaaataatgtgggttataacgtatactctggttgggcatggtggctcatgcctgtaatctcaacactttgggaggctaaagcaggaggactgcttgaagccaggagttagagagcagctcgggcaacataatgagaccctatctctaaaagacatttaaaaaattagtctggcatggtggtgtacacctatggttccagcaactctagagggaggatgtcttgagctcaggagttcaaggctgcggtgagctatgactgtgccactgcattccagcttggggcatgagtgaaaccctgtctctaaaaaataaaaataatataaaagtacactctggacgttacaagtatttttctgcaattagtcctagaaaaatacaattattgaaatagattttcatattctccattcagaaaataaagtatatagagcccctactctgtgtcagagttttctagggaatatgtttgtgaaaaaataaccctgctctcatagattttacattttattatgggaaggggaaaatagacagtgaaaataatatataagtaaatgtatgtattataaaaaaataaaaagagctagttgatgggcactgagagttctggctggaagatggggagctataattttaaataaaatggtcaggacagatctcgcagaaaaggtgaacattcgaacacagacccgagtgaggtgaaggggcagccatgtatatacttgtgggaaaagctttccgagcaaaacttccccacacacctttatattgcaccctgtagctactcagtcttcagccataaaatctatgaaggcttttaaacatcagtcacgttatgggaggcttcagtaagaaatatcttggaaataatagtggaattctatgagaagttagagtgttttctgtggggcacagaaataaatgtctatttataatgcattgacatgtgtattcaaatagtttttttttcattcttgaagaactatcaagaaaagttatatataaatctgctctcttcccgaatatatttaactttcaagttgttcatgcagattctcaagaaaattgccccagaaaagaagcagggtgttaaagctaaatagtaacaaagccagtgataacattgtacttcccttggttaaagagaaaactcatatcacagaaatggatagcctccttgatgaatttctacattttgatttatatcaattgcattgtaggtaaggtggggtgggaaaagaggacagaccaatagaagaggaaacaagctagtttagagaaatttgtgattccaccatttgagaaataaatgcatatggaggaaaaaaaaagcaatgctcatcaaaaggcaccataaaaccacattatggaaagaatatgcttgtctatttctttcaagaatgaatgagtaactggtactgtaattccacaacatttcccccccccaatttttttttcctggaaatcctaattatgtatggaggtttcagatctgtgccccagccattgtcttcagcatatcatgttagggtggggtgtccagagcaaataggaagatgattcagtttacgaatattagttgacttctatatagatagaaattagttctcctgctcaaagcagaatattccccttccagctccactgaaaggggaaacacacacacacacacacacacacacacacacacacacacacgcttcaaaagcacagatatttattcctctcacttaaaagacagatagtggtattaagacaagactggttgggtgttccggcaagtcaggcactgacgccgtttctccctttttgcttctctgattctcagccctggttctcaaattcacggtccaagatggcttactgagttctgatcatcatatttgcacatctgttagcagaagcccacatcctcaaattcacatatctttataacatcttcgaaggaaatgcgcagcatttccatctttatcattttggttatggcttagtgatacagacttcgctctatattttagggaatgctgtgtccagatcatactgcaaatcaagatgtttacgatgaaggatgagtgggtccatgactactaggggagggcagctggaaactgagctcttaaaaggttctctatgctactgataagagcgttttgtatgcttacccccatgtgcctatatacccacaccttacaaaaacatactgaatgtgatagatgcatgctatactctatcgcattccatatgtaactgtatataaatttataatagaataatgaaacaggtagtaacttggagtatagtatgtcatctctgattatttattgaattgccatttagtaaaaattccgtagaatttatacaaagagtaaaagaaaatattgactgttaacatcttataattttctctcttcaaaatttgttttctctagtgacataaggtacaataataagaaaggcattttaatattattttcagttcctccatatttaatgtgcctaaaaattgattatttcattgtgctctctcttcctctatctctctctacctctctcttcccccatccctctccctcccatttgctttctttttttcctgttctgaacggttagatttactttatttccattatttttactggacacttatttttgtttgccatttttgttttgaaaagtataaaatctaattacaagtttaggtcaccaagaaaagggaattgatatttttcacgatttctattgtttgaagagaatgaattaactggataaactatacttatattgctgtatttctgatctgaattcatcagagaaatatgtataatttttagacagaattagaaactacagttaaagataattcatcatactaagagtgctaaactacaatatttgctacatttacatggcacactgtttctatataatcagtggccatttttgacaggagtgtgctgattaggtagaaatgtttacaatccagtcatgggtgaacacagtgatatgatcatgaaatgtcattcatgtcagtgtcgatgatttgcgaaactgttcattcttgtgcaaacattgatcagttaagaaaacagacattggcatttgtcatctagggttcaaattacatcttaactatacatttgatgtctgcaatcttggaaagtttatttgtctatgccttaggatgccaataagtaaagtcaacttaatggtttctttttcttcagataactatggctctaaatgtaagacaaagtgtaccatagtttacaacaatcaccaaggcacattacatattggaaaatcatttattaaacaaatgctctttcaggttttagccttacaatattttatagtgagcaggcattttctaatgcatattctattctacacgaatattttatttaataaaaattggataatcctaaaaatatacactaagtctacaattaaactatatatatatatagtttttaatcctactatcttttttcaatgaaacatttaccagtgagcttcaacagcctgatcagttgaacaaattaataattgaaaatattgaaaatgaacaaaagagtgaagttcttgaaaatggcaaccccttcccccaaaattgttttcgtagagatccagtcagcaaattctagaagtcactagggctttctgttgtgacttcacaaatttgcttaaaacctatgcctactctttaaaaaacttgacacttgacattttctcagtttataagtgatttgggtaataaagctgaagggaaatgaaatttgtcagcatgttaaatgcttttgtctctctgaatataataacctatgctggtggaatggatggtaatcacaggcacatttttctaatttatcattaagttatttaaatctctttttgcagttttatttacttcctttatttgttatccttgtgtcaaatttaaaactttacatagaataaaacatattttttatactctctttgactagcactgcagagttatgaggtgagaatattttgtagctccttcaactcaaaattttatttttttcctgcaatagatttattcaatgtctcctagcatttataagttgaaataaggtttatttgatatattgtgatatattttgttcactgataacattttgtccaagtcatagttttaaatcacattcagagaggtaagacacttaaatgtcagatatatgaagtaaggtgaacctttggaaagcatgttggcaaaagcttctatttcaccttaacatcaatgaaaaattaatatgggctccatgagcagaagagcaagcgtgctctctccctgtgtgccagacatcattcacagtgctttacatgaatctcaaggatattatgctaagtgaatttgtttaatcctcacaacaatcctaaatggtaagtaccattattatcattatccccattttaataggtgaagagaggaacaggtaagctaaacaacatacccaaggtcacagagccactgaatgtagtaccaacattcaaactcagaatgttggtaccagaataagaccctttgcctgtaagctgtgttcattcccaatttgcgtatctgccacatacagcacaaagagacttgacttgtatctgtaatgtattatttttttaaaaatggaggcaaatattgtaaactgttgacatattaatctgagtagagggtaaattaaggcttgatatgttattttctattatgatctactatttgaggtatttcataatacaaaaaatgttgagaaacaaaattaaatttcctatgctgtaatgcagatgtggggtcatcgtgggggtcatctatcttgaagtcagggcctgagcatactcaatttgtggccctgtcacttcaacatgacattcttgcttcctgttattatttcacatgcagtaatagccattaagcattacagcttgtaattatggtgtttatggaggaagtcaaatgcaacatatgaaataaaagaaatttgagaagtctataactatatcctttgagattgctaagggtctgctgtattttgcatctacccccaacatggagaattgagtagaattttctaaaagcttcactctgcttattaatgagatagaaaatctgctgcttcacgctggcgctatagtctatattcatcttgaaataggtaagaaatgcttcctgcacttattgtcctaggaagagacaaataaaccagagggattttctaggaaaataaggactttaaaaatcagatttttttatttttaaaatttttaaaaaaatatttcagtagctttagggtacaggtggtttttggtgacacggatgggttgtatagtggcaatgtctgtgcttttagtgtacccatcactcaaatggtggccatggtacacatcaggtaaattcttatccctcatcccactcccaacctccccctttctgaattttcagtgtctattacactattctgtatgcttttgtgtacccatagcttaattcaaaatcagatctctatgtaacactagtcacaatagtcaagacatggaaacagtccttaaatatccgtgacagatgaacagataataaaaatgaggtatatacctacaatagaataccatttagccttaaaaaagaagcagattctgcaataagtgacacaggtgaaactcaaggacattatgctgagtgaaataagtcagtcatagaatgacaaatactgtatgattacacttatatgggctatttaaaatgctaacattcataagccagagtgcaatcttggttgccaaggtctggtgggagggaaaatgctgttactaatcaactgacataagatttcatcaaagcaagatgaataagctctagagatctgctgtatgacattagacctatagtcaacaataatgtatttcacaattaaatctcttaagacagtagatctcctgttaagtgttcttaccacaatcaaatcaaatttatattaaaaataagatctttagatgctgtattctccctctgaggagctgaaataaaagcagtttagaaatacaagtgaggttgatatttagcatatgaaaacatgaaaatttgacttttggcatgagaagacagttgaatctgacagatttttttcttttaaatgtgaaatagtactggatgaatgtgaattacctcctctagaaatttagatgtatatgttattaagctggatttgttatgaccttagctgacaaaataaacagttctgttgtgaataagtcttaactaaatggaaactgaaaatgcattaaagtgaaaaagttatacaattacaaattcaagcttctcaagagtacttaacattcaggggtttaaaatagcagttttcaaatgcgttcatccaacagatacttctccccatctcccatctttacagcacccctttctaatctgtttttccttttactcctgctctttactaactatgaaaatattaggctttttcaatgacctgagtttgccatttacttatttgattttcccttagccaattttgaacattcttgctttttaatttcttaacctctaagatgatagtattatgttctaaactttaaaggcccatctgatgctaaacttacatgattctcattgtcttcgggctgtgaaggaaatgttcttgcagccagctatgctgtagttatcacagaattagccatggtccctcgtcctacctctaaggaaagtgaataactctgtggagtgaataactattgtgttttattatcataattaattaattagagtctgcctagcatctattctcccctttagtagcaatgtcccaattgtttttccattgaggaataacctgtcctcctacctttgatctgtgtgatttgacaggcggaggtgggcgcagaaattcagattagaattgaagccttaatttattatagcattccatattaccagccacattcatacacatacaacacacgtacacacacacatatatatgtgtgtgtatgtatgtatatatacacatattttgttgtgtgtgtatatatatatttgtgcatgtgtgtgtgtgtatatatatatatatatatatgtatatatattggctcacacaatttggagtctggcaagttcaaaatctgcggggttgaccagctggctgaagacccttggacaagctgacctagctccagtccaaagacaatcttttgaccaaattctctcttcttctagggacttcagtctttttataaaggccttcgacttattggatgagacacccccacccacattatggagggtggtgatctactttattcaaaagctactgattaaatgctattcttatcttaaaaagagcttcaaagaaacatcttagattactgcttggccaaatatctgcatactgtggcctagccaagttgacacataaaattaatcattataataagtatatttttaaaaattggtatttgatgacatgaaagagaatacagttgtccctcattatatgcaggggactggctccaggataccttcatacccaaatccgtgcatactcaagtcctgtactccgcttctatgaaatgttggctctctatatgcatggctttcacatggtgcaaatacgggattttcaatttagatttggttggaaaaaaaatctacatacaagtggatgcatgcatttcaaacctgtgttgttcaagagtcatctgtatatacatatgtgtgtatatatgtatgcatacatatatacagtcatgcatcagagatacataatcagaaaagggtctctgtatatacgtatgtgtgtatatatgtatgcatacatatatacagtcatgcatcagagatacataatcagaaaagggtctctgtatatacatatgtgtatatatatgtatgcatacatatatacagtcatgcatcagagatacataatgagaaatgggtttttcttttttgagatggagtcttgctttgtcacccaggctagagtgcagtggcatgattcggctcactgcaacctctgcctcccaggttcaagcaattctcctgtctcagcctcctgagtagctgggattacaggcatgaaccaccacgcccggctaattttttaattcttagtagagacaggatttcgccatgttggccaggctggtctcgaactcctgacctcaggtgatccacccaccttggcctcccaaagtgctgggattacaggcgtgagctaccatgcccagccatgttcttaggtaatttggtcattcgaacaccacagtgaaacatttttcttttttcttttttttgagacagaatctcgctctgttgctcaggctggagtgcagtggcaagatcgtggctcactgcaagctccgcctcctgggttcacgccattctcccacctcagcctcccgagtagctgggactacaggcgcccaccaccacgtttggctaatttttttgcatttttagtagagacggggtttcaccgtgttagccaggatcgtctcgacctcctgacctcacgatcctcccgcctcgcctcccaaagtgccggaattacaggcgtgagccaccccgtctggctgaaacattttttaattgagacagagtctctgttgcccagactggtctccgaactccaggtgcttctcctgcctgagcctcagcctcaggcatagctagaattacaggcatgtgccgttgcacgtggcttcaaacatcatagtgtgcccttacacaaacctaggtggtatagactaccacacacacataggctatctggtacagcctactgctcttaggctagcatcctgcatggcacgttactgtatggaatactgtaaacaattataatgcaatggtaagtgtttgtgtatctaaacataaaagatactgtaaaaatatggtataaaatataaagtatggtatacgtgtagggcacttactatgaatggagcttacaggactagaagttgccctgggggagtgggtgagtgaatgtgagagcctgggacatgactgtacactctatggagttgataaatgttgtacacttggactataccaaatttatttttttaaaatcttggtttttttttccttgagacagtctcactctgtcccccaggctggagtgcagtgacgcgatctcggctcactgcgaactcagtctcctgggttcaagcagttctctgcctcagcctcccaagtagctgggattacaggtgtccatcaccacgcccgggtaatgtttgtatttttagtagagatgggttttcaccatcttggccaggctggtcttgaactcctgaccttgtgatccacctgcctcggcctcccacagtgctgggattataaggcgtgagccaccatgcctggccaaaaggtctttcttcagtaataaattaaccttagcttactttttaactttttacctgataaacttttaaatttttaaaacctttttttactcttttgtactacagctgcaaacacaaacacttggtatagttgtacacaaatactttctcctttaacttgcaagtagggtaaaaaaaattctctttatgtcccttattctataacctcttttctattttttaattttttaaactttttaaactttttcatttaaaaccacaacacaaacatgaacattagccttgccctacataggatcaccatcttccacctgcacatcttgtcccacaggaaggtcttcagggacagcacacatggagctgagccgtcttctcctatgatagcaatgctttcttctggactacctgcttgaggctgttttatacttatcatttttttcttaatagaagaaatgcactctcaaatcatcataaaagtatagtaaacacatcaaccagtaactatcatttattatcaagtagtacgtgctatacgtaattgcatgtgctacatcttgtttaagactggcagcacagttaactttatttacatgagcatcaccacgaacacatgaatactgcattgcactacaatgtgatgatggctacaacgtcactaggtgacagaagtttttccactccaccatagtcttacaggatcactatcatgtgagatccacctttaattgaaacatccttatgtggtgtatgactaaatgtgcacacttcagaaatattgagggtttggttccagaccactgcagtaaagtgagtattgtagtatggtgagttacacaagatttttgtttcttccagtgtgtataaaaggtttatttacaccatactgtagtttatgaagtgtgtgtattaggctgtttttgcactgctataaagaaatacctgagactgaataatttataagaaaacaagtttaattggttgtggttctgcaggctgcacagaaagcatagtggcatctgtttctgaggagggctcaagaagcttacaatcatagcagaaggcaaaagggagtaggcacgtcacatggtgaaagaaggagcaagacagaggggaggtgccacacatgttcaaaagatcagatctcatgcgaatgcagagttaaagctcgtctatcatcaaggaggtagtgaaaaccattcataaaggatctgcccccatgatccaaatacttcccagcaggtctcacttccaattgtaatccaatggggaatacaattcaacatgaggtttgggcagggacacatatccaaactatatcagtgtgcattagcattgtatctgaaaaacagtgtgtatgtcttcacttaaaaatgctttaatgctaaaaaacgctaacaatattctgagccttcagcagttgcagtcttttttttttttttgagacatggtctcactgtcacccaggctggagtgcagtggcacaatctcggctcactgcaacctctgcctcctgggttcaaacgattctcttgcctcagcttcccaagtaactgggactataggtgtgcaccaccataccaagctaagttttgtatttttgatagagatagggtttcaccatgttggccaggctgatctcaaactcctgacctcaaagtgatccacccaaagtgctgggattacaggcgtgagccactgcgccaggcctgagttgcagtcttcttagtggtagagagtcttgcctaaatgttgatggctgctgactgactaggttggtggttgctgaaggttggggtggctgtggaaatttcttaagacaacaatcaaaactcaaaattgaagtcaatcctctgaaaccctctctgcttctgcttcatcaactaagtttatgtaacatcctaaatcctttgttgtcatttcaacaagatttataggatcttctccaggagtagattccatcttgaaaaaactactttcttagctcttccataagaagcaagtcctcatccattcaaattttatcttgagattgcagcaattcagtcacatcttcaggccacacctttaattctagttcttttgttatttctaccatatcagtggttacttcctccactgaaatcttgaactcttcaaagccatccaggagaactggaatcaacttcttccaaactcctgttaatgctgatattctggagtcctctcctgaatcctaaatgttcctaatgacatctagaatgctgaatcctttccagaagatttccagttattttacccagacccatcactggaatcactatctatggcagctacagtcttacaaagtgtgtttcttaaattatagacttgcaagtcaaaattattgatccatgggctgcagcatgatgttttgttagcaggtttgtaaacgacattaatttccttgtgcatcatcagtggctcttgggtgaccaggtgcattgtcaatgagcagttatattttgacctaagcagtaggtcccaacagtaggcttaaaatattcaataaaccaagctgtgaacagatttgctgtcatacaggttttgttttactatttatagagtataagcagagttcatttagcataactcttaaggggtctaagatttttggaatggtaagtcagcactggcttcatcttaaagtcgccagctacattcgctcctaataagagagtcagcttgtaccttgaagctctgaagccagtcattgacttccgctcaatagctatgaaagtcctagatgacatcttcttccactgatcgcagagcaacataacagatataatagtaatgacaaagtctgaaatattgtgagaattatgaagaggtgacagaaggacacaaagtgaacacaagctgttggaaaaatggcaccaattgacttgctggactcagggttgccgcaaaacttcaatttgtgaaaaatgccatatccgtgccatgcaatgaggtgaagcaaaataaaacaaggtatgtcagcataaaatgccatttttaagtttaaaaaaaataatgaagcagacaggtgaattcactgcccaacctaagcactaccacaccatgaatgctagtctgttctccagcactccttcctagttccattctgtttctctctgatttgttagtttattacttttatatttaaaaaaaagtatttctaccacatacgcatgtatccttaaataacatttgtttagtcacttcaattttgtttagtattcagtcatttgcaactttcctcttttcatcaagattgatctatgtcatcttattatctgtagctattgttcattcatttttaccagtgtatgaaattccactgggtgatcatagcacattatttttgtccaatgtcttttcaatagatattagagttgtttctattgctgtgctctttgggaaatgctgttgctaataggctcatgatggtaagtttcagaaattctctggggcggtgtgtctccaaatggggtccctggaccagcagctgcagcagcatttgcatcacctgagaatctgttagttctgtggtcttaatatttctgtcccctcagattatatgatgaactcttaacccacatggtgatggtattaggagatggggtctttgagagatgattaggtcatgagcatagacctcatgattgggattcatgattgggattggagactcctgagtactgccttgcccctttcagcatgtgaagacacagctgaaatttccacctatgaacaaggaagtggaccctcaccaggcaccaaatttaccagtgctttgaccttggacttcccagcctccagtgcaatgagagatatatttctattgttcctaaactatccagtttatggcattttattatagcagctcaaacagatgaagacagttagaaatacaaattctcaagctctaaatcagatgtacaaaatcagaaactccgaggatgagcccaacagtctgtttttgtatgtgattctgatgttctctcaagtataaaaattatactaggagttagcttgctcattcttgactcagtttaccttagttgttaaatcttttatcttagaatatttctcagttttatatctcttcaattccctgaagagattaagattttaaaaagatttcatttttttatctcatttcttctgggccttgtaaattattcttctaaataattaatttattccatcttaatctctaaatcctaatcatagatttgagaatttagatctcaaggattaattttacttccctccattgcttctacccttttatatctattgatttaaatatttcagatttatctcatatttattttaatttctaattttcaatcatctctaacatttttaagcgcccattatttctgtatttttcacgttatctcacattttccccattttcttattttttaatgtgtttcatttttattcttggcaagaaatgagccttataaattgtgaacaaagggttcatgttagaaccaaaagataatagtgattttattttttaaccataagttgctttaataccctcttcttaccttcccccaaaaaagtcatggacaggaagctgtggcaagttgagattgtctcttctttgaattaatttcccttggatagaattctcttttcagctcagctaatttgacccagaggaacagtggactttctaccacccacataggcaaagtaaggaggactttgttcctagggagttccctcaagccatgtgtcaaatgtctgtgacattagatggagtctcaccagtgggttaaaagatgcctagaggaagcaacagatgacacatttttataatctgtagataacaatagccctagaatttaggatttttatatgaatttaggattttttattttatttttatatgagaaatatggaacttctcaatcagtgtttgcatgtaagaacacccattggtctttgttgacacaaggaatattaaggggctagagtagagaaagtaacggtgcttatgagtcactacttaaaaaaaagaatgtgtcaaatattagagacagaatgatgcagaaattcgaaacacgaactttggagctagaatctgccagctgtatttttgggcaggggtctggcagctgtgaatcctgctagctgggtggctttgggcaactttcttaacttctctgtgcctcaatttattcctggatgaaatggaaataataacataactgttctatagataaaatgggttatatgtaacctatgaacatggtgcctataattacgtaataaacactgtaaatgtgatgttattgttgttactactgtaattacataatttacatttttccaaatgtatcatatcctcacaatgttggagtcaccctctagtgtttgaaaaagccttatttatagccaacattttaacattattttaatattaacttatttaaatattatattaaatattatatttcatattttttgggaaaatgtttatttctctggaatgagagcttttaaataatccattaaatattaacttagctttttatttatttgaatacattatgaagaactgcaaatctctagaagttatagctgagagtttactactaaagaatgcatacatatacatgcacacacacacacacacacagagtaaagtaacttatgattagaggtgctttacaatttaagtactaatacaaaagaaacacatgaagttggagtccacccttgatttttctatggattttccattaatggcttgaaatcctttaatgaaggaggcctactgagctgagttatacacatttttgttagggaataattaggttcatgaataagtaattcaaaataatgaagacttatgagttgatgtgaatcataaacaagctgttattgtggttgccctcttagaattgaaaattaaaggattagtcatttctttaagattgaccttcttgggtctaatgaaaatataagaaatattttagaataatttttatggaagactgttgtccatctttttcaaaattctcaagaaaatctcaaaagagtcaacaaacagagactatggaaacaatccacttagagagtacttgaccaggcttaagaatggggcagtactgggatctgggagacttggcttcagtgtgctgccctaaactgttcattctgaagtgctctgcaaacctgagcctccgagacaaaaggaggccaagctcgcttcaagcaattgtcagttcacaccatggctgtttttcatgagttttaagggctgaaaagggggatggaaagacagtttcatctctcatgccaactacaatcagtgggtgatgagtatctgcctggactatgtcgaaaatgaatccgaagttaattcccagctcagagagtgctgtaatcaattaatggagtctggcattgctagggagaaggataatcagcaccctcaccaggtattggccatcccaggatagagggatgtcagaaagaaagacaagtctcctttgttcagtttggaaatcatgctcatttgcctgggttaattttatgtattggtttgcataattgaaatgccagactcctcagcagttttttggaccagatagcttaaaacaaatagcactatgatgcctaccttctcacagtttatagcctaagtgagcaggacctttgtctgattcatttttgttttgttattagaataatgcctggcatatagtaaatgtttcataaattattgtcattatatattcatcgactattttttgagcaccattttgtgtctatccttgggttggataatgaacgaaacggaaatgtcatctgcttaatggagcttgtgcttagtgagagggttgggcatctgatgaattaataggcgaattgtggtacatgctactaggtcaatgtactgagctcagggagagagaagaatggtggaatctgcatgagaataaagattttgggaaagaccttttgagaagaatcttttgatttaaaactgaaagatgggtaagaatttgccagctagagatcgtgattttgtttggaagaagattccaaacaaaggaacagcatgtgcaaaatctgggcatgggaaagaatttggcatgggataaaaggctggcttggctgaagtatagtgagggaggggatagactttaggatgaccttggagagataggtagggccaggctttcctgagcctgaaggtcatattaaggaacatgaaatgtaccttaagagtaatgggaaaccaataaagagctggatatgggttgagttgtagaaactattaatattgattgacattttaaaatgtcacactgggagaagaattggttgtctaggggaactttcccaagattacaggggcaaagccaggctactctgcaacgtatggcaataaacacatagtggctatctctttaaacaaagcatgagtactccatcttccaggggttcacgtccactccctttggctacattggtgacagtggatgtagagagaaatggatgaattactttgtacttggcctagtttactcctcaaaatgacctgctttgctattgtacaaatgaagctgtcaccactggaccactatctttatttcaataacttctgtttacattttctctaaattcccttttccaactcaaaaggttgaaaaaaagaagaagaagaaaggcccactctccaactttcagagagaaatgtactggaagatgagacagggaaaatggtcttggctatttgtagacttgatctaatgtctaggaatgataattagccctgtgaattcctaaagggactgcttgaagtcaagtttagcacatgcggtggattgccctcagaggtgaggaaataacttcagttgagtcaaagtgtagtttccattgtctactttagcatgattctcctgccactccattggctgcaccctttaaccttgctgcaggagttctcccagttagtaaatggtgagcatcttagaacactcatgtgaactattcttatgtgagagacagcatgaaattggaatatagtctctaagcccaagtttctcggcaggctttctgtgacagtttggtctgcactccatcaatgcagctttataatgttgttaaattttgttaagggagcattgtgttaattaaatcatcaagcagatattgggtagctaaattgcaattatttggtctttgatcaaaactcaggctttctcaagtaagttggtcagagaataggacttttattgttcacattgccagcagcaagaaaaatccatttttccccaacccagacatgtttaaatacatcttaattgtcctgattactctgagagttttgttctcaagacttggctccatttaaagggctgagtacttcttgagaattgtaagaaaagcaaatctgactgaataaggccagctaagatcaatattttttattaactagttttctttcattttgtactaagaaataatgcagatgtgtcatacaatggttatgacaatgcaaaagttttatcttctgaaaacataagactcctgccacccttgaacctccagttttccagaccccattgtcagagtgatgttggacacaatttcatgtgtctccttccataattagtctaaacatgacgtacgagcttgtgtatggactatgtatgcacatctatacaggctatgctgaaacagatatatagcacatctgtgttagtctattcaggctgctataacaaaatatcttaaacctggtaatttataaacaacagaaacttattgctcacatgtttgaggctgggaagtggaaggtcaatgtgccagcagatttggggtctgttgagggctcattctctgcctcacagttgatgccctctatgtgttctcacaaggcagaagatgcaaacaagctttctcaggcctcttttataaggtactaattctgttcatgaaggctccaaccttaggatctaattaccttctaaaggccccacctcttaatcctattgcactgggaattaagtttcaacatatgaattttaagggggacacaaacattgagattatagcaatatctgtcattttctgctcattggagggcttctttacctgttgtgcactttgctttttgtacttagttagctctgccattgtttcatgattcttggtaatttcaatattcatgtaagtaaagcattcactaccctgaactctcaatgaactcttcctcaatgattttcagtatcttgttttctttatcatgctataatctggacttgtcattgccaataaagaaaaacagcattttattctcggactcctgagtcccactctccagtcatcacctctaggttcccaacaattcttcaaccccaacatgacctacaaaccattgagaccaccactgtttgtaaccttgtaacccctcaaatctgctcttcctttcttagccagctgagatcccaaagtccaatatatacatacatacaaattttcctttacatatgcccttaaatttctcacccttcattatacacatcagagagaaccgcatcataggttgaatccaacttttgcctatttcatgtctaaacacagtctactacctggcctgacgttaaatgtagaattgctaaccccaaatgggccctctgctgctgatttttctgcatcttttctttagtccattaactctcccattctcttgggacctttttcttcctctcaaacctgcaaaatctcctccccaaacttggctgatgatattgcttttttattttatttataaaaaagcaatcataagagagcttccacatattaataccagtcacctactaactgacaggctcttcaattgtatactctacctttcatccaggtactgcagataaatgattctgcgagcctgcagctaacttttgcagggcttgaaggacgaatatgcttagagatcccagctcaggtctagacgtcttctttttcaagatccattcccctctgtcatgcaaagagcaacccttagaaatgtggttcatcctctggaaagttggcctgggaagaggatcttgtaggtcttagaagtagattccaattcattgaacattacatggaatgcattctagaagtggggacactggttcccaggctatctgtggaggggtaagacatgaggagggtgacatggaagctgtctgaaagcgtgaggcacgtgccaagggttcaaggtgccagatcgaaaagcagagtggctgtctggtctcacactaagaacacaccgcaccacttgtacaattttatgccatcatttactttgatcccttctcttgattatgcagtgaaagttcccactttctcctgcatcaatgatattctcccatctctagacagttatcctcagcatatacatgtgctggagtttcatccatctcataaaaccaaaacactaaactaccaacttcggggcagtgtgttaagtatgagataactggaaaactatctaatacacaagcagtttttaaaattactaatcatatgaatgaacaaatacatttctcattgatgtatcattttatattttataaaatcattttgtattatcttcctccttctcccctatatcttcgaccctccaataactaatttctttgctcacctacaaaactctttgaacacatagtttatacttgctgccatcacatttttctgtcctgtttcatcctgactccattccaagttgacttttatcactgctactccacaaaactgctctggtcaaggtcatcatgacttctaaattgctaaaactggtagttaatccccaatcccatcgtagccaatctgcaacattctggccagttattcactctattctggagtcatttcttcccttggcttctaggtcatcactgattttgagtttgtgtattttgattgccctgactcagttgtcaatatctcacaataggaaagccccgagaagctgctggccacttcctcccctgtcaacactcacattctgaatgattgggtgtgttaaatatgctgtgtgtgctgatgcctctcaaatgtgtatctccagccttgattatgccctagaaatcgactctcactttttattatttgcattcacatgcttaacggcgtctcaagctgaacaggttcaaagacagcttctgacccttccactaacccgctccaattgctgcatcttattcatgtcattaagtgggaatcccatcctttcctttgctcagacttaaaaccctagagtacctttgacctttctataccccacttcttgcatatctacagatgcttttagctatataccgtgtataagaagtttatacagactaggaaatttgatactctcattttttatcactccctccctgaatatgacaaaaacttttccagtaactactgggaaatgaagcaaataaaataatggtctaaagaaatgcagacagggaagtttttcttttatgttttttattatatgaacatgccagcaaaaatgtatgtaaatgtataatttttatatacatagtaagatagtaatagttttaatgacattaatgcattttttaaaaggggaaaacctgtgcctagatatttgtctttctcagtatcaaataccattagagcgtttgttaaacaaggtataaaaattttaaacacaaaagctccaagtagtcatataaaaaggcagatttaaagtgtcgcatgttttgccgtttctttattataatctctggggtctcagtgtttatttcacatctactctttaaacgcagaacggtgtagttccactgtggttggagggacaagctatgcctgaagcaagcttgaaggcatccaaatatttaagactctgctcttggaataaatgcatgtgattgagtctacatgtgtgcggggccaacttacgaacagggattttccaaatgaactttcatttacaaaacaatgtttattaaagaaaaagtagcagcaatgtgataatctgaaacttttatacattattaaataaaactcagtggtaactactgcaactgattagaaataagatgaataaaatatgtttctgaggaaggattgttcttatcactgatattgttcataatttttggcatggtgataagtagatcaaattgtagtcatttcattatcctttaaaaattatctgtaatcactgtgtgccccctgttacctgtgcccaggacagtccccttccacacctgtcctctgtttcccactcattggaaaaagaggtagttagcctgtgacatcaatggttgtttaatgtgagtctataatacctatacttgcaaaaaaaaaaatcatgaaatagtggcctacaaaacagatcaaccctcacatatcttttattttgactgtactgggcttttaaattagtggccatcatttaacaatgcagagagtttgcataaaaatatgtattgctagctgctcttaaaatactggtagctgctataacatgggtgaacctcaaaaacattatgctaagggaaagcagtcagaaaactctgcctatacgcattgtccagaatggagacggaaaatagattagaggttttctcatgtgagaggaaatgaatgtgattgctaatggaaatgggaactttgtgtgtgtgatagtgaacgtgttctcaatttatgttacagtaatagctgcactattctataaatacactgaaaaccatggatttgtatactttaaacaggtgatttttatgctatgttaatttagtctcaataatgccatcagaaaagacaaaaaaaaaaaaagaacagttggaagatcaggtaatactgatgccacatttccctatggtaaaaactgctggtattttattaggactttttctatttaaatggattctacgcttttctgctcacctcagtccctactaattcttcaaatcactctcaatcctgaggccaaagcccaatttgtccctgcactgttttcctcaccataaaattaagagaaatttaattttttttggtatccgtatctctagcaaatataagtaattgaaagatacaactgaagatgaatcatatgttccatgattaatgaggaacagccactttctccgtggcctcttgtctatctcattgattttgtatcacctaccatgctgccatgtcttagagctcttcctaagatggatgagacagaaggagcaaaggtgtgttccaccagaatgcactggtcccgccacagctggtgtgcatgcatgaggtcaaacccaccaatgtatcatctgacttgctggtatctaggctgtggccacattaaatgtcacgaaggtcacctctgtggtatgcctcatggatggtagagttgacaaggcagagcagaaggcccctaggacttggtgttcaaataggtaggggccgattcttcagtgttcacccagactgccattaccttcccttgccaggcttcacctcctggcctgtttgtttctgatgctttgccttcacgaaggtggaaagccctacagtggtctcatagagtaatattctctctttctctctctgtctctctctctctctctctctctctctctcacacacacacacacacacacacacacacatctatgaacataaatttaaaaattcatcactaacggctgggtgcagtggctcacacctgtaattccagcactttgggaggctgaggtgggcggatcacctgaggtcaggagtttgagaccagcctggccaacatggtgaaacccgtttctgctaaaaatacaaaaagtttgccgggtatggtggcgtgcacctataatcccagctactcgggaagctgaggcgggagaatcgcttgaacccgggaggtggaggttgcagtgagctgagattgcaccattgaacactagctcaggcaacaaaagccaaagtctgtctcaggaaaaaaaaaaaaaattatcattaactatagagggtggtattagggctctgtagaaggacagaactaacaggatatatgtatataggaaagggagtttattaggagaattgactctcaccatcacaggatgaaatcccacaataggctgtctgcaagctgaggagccaggaagccagtccaagtcccaaaacctcaaaagtagagaagctgatggtgcagccttcagtttgtggctgaaggtctgaaagcccctggcaaattgctggtggaagtccaagagtccaaaagctgaagaacttggagtctgatgttgaggtaggaagcatccagcacaggaggaagatggaggccagaagactcagccagtctagtccctccacgttcctctgcctgctttgatcctagctgcactgacagctgcctacatggtgcccaaccagatcgagttgtgtgtctgcctctcccagtccaccaactcaaatgttaatctcctttggcaacaccctcacagatacacccaggaacaataccttgcatccttcaatccagtcaagttgatgctcaatattaaccatcacaagggccttacagtaggaggtgacaggatgtacatacgataacaatataagacacaagtatcagattgaacacatgagttaaattctggttcttcactgggcgtggtggctcacgcctgtaatcccagcactttgggaggcacaggcaagcagatcatttaaggtcaggagtttgagaccaatatggtgaaaccctgtctctactaaaaatacaaaaaattagccaggcgtggtggcccacacctgtaatcccagctacttgggaggctgaggcaggagaatcgcttgaacctgggaggcagaggttgcaacgagccgagattgcaccactgcactccagcctgggcaacagaacaagacttcgtctcaaaataaataaataaaatttaaaaattctggttctaccacttaccataggtgtggcaagagataggcccctttcaaacttagctatctcagcagtagaatcgggagaataatgctttattattactattttatagctaagaactttgaaacaactaaacaaaaggaaggatctctttgaaagactgagggttttctggtggtggccacaggcagggataatgcaggagtgtgctggactcaggctgtgtggcgctggctctattccctgctcagctcggcctccctctattctctgagcaaggctttgctttccagctgcttccacagctacagcatggaacagggagggctgcttcacgtctcccgaatgtgataccttcttggttctattacgagaattgaatctcttggccctccttccaaattctcggagaagtgatggatagatctagattagcccaattgaacactgaggtttagtcacgtatgacttaaggaacagaactcaatatagcaaataaagtggctggagacctacaccaatcatgtgtggattggttgggaaaaggatggcgtggagaaaaggcagtcattgtgactgaacccatatccccaaagataaatacaaaaatgcatacctaaatgttcttttttaaaaaactgtattattattagctttaaggtagaaaagctgaaggcagcaaatttaggaagtgcctaaagacaaagcaagttgactgctgtgattattatgattcagaatgctatgaaatgagacccaagcctttttttaaaattctagaaaggagactccttaagaactcaaatacatttggtgtttgccttttttttttttttaattttgaaaatagatctggtcgacaaaattaaattgttttctacctaaatgtattcattcatgcctattcatcttaaaatgtcctgccatatatatattttttaaaaaatacatcgtatcagcgagactccatctcaaaaaaaaaagtatgtcatatgatggtcagcacttaattggtggtttccatcttttctcagtccatttcctaaaactctttacaattctttcttcatacagaattcaccatagagaacatagagaagttagaattcatttctttctctttctgtctcttcctttttctctaagtacacatttttgtaagtctctgtagtaattttggtacttatgggctttccatgacttggcattaggtcagcaagaaacaggcaataatttgacactttgatatttgccaaatttttcaaaatacttaatattccacttactttttttctcataatattgaaatgaggaataaaatggagaaataattttcagagaaaaagaaatctttggctcagcaattccatttcaataaatttaccataaaaatagtaaaatataatgttctaaattgtatacttctgtacttattactgcgttgtttataataagaaaaatttgaaacaattagtttacaataagaaaactaaagaaaactttaatgtccaaaaaataaaagctaagttgaaataattatactacatgtattcaatgaactcttctgtaatttcaaaagcacatcaccagtgcgtacaagagtgtgataatagttttatgaatttagtttcatatcagacacttacatgtacacagatatgtccatatgtacacatgtataatatgtgtgtatgtagtatatgtgtttgtatatgattggtaaaaatacaccaaaatgctaacagtgatccagtgatagcatggatgttgtggaacaaagctaggcttggcttgcctggcacagtaagaccagatacccacactgagtgtattagccagcctcctgaggaacagaactaataggatatatgtatatacgaaagggagttgattaaggagaattgactcacaccatcacaaggtgaagtcccaccataggctgtctgcaagctgacgaacaaggaaaccaatagtagctgagttggagtccaaaagcctcaaaagtagggaagctaacagtgcagccttcagtctgtggctgaaggcccaggaccccccagcaaaccactggtgtaagtccaggactccaaaggccaaagaatctgaagtctgatgtccaagggcaggaagcatccagcacgggagaaagatgaaagccagaagactcagcaagccaggttatcccaccttcttctgcctgctttttctagccgcactggcagccaatgggatggtgcccatccacattgagggtgggtcttcttctcccaggccacagactcagatgttaaccttctctgccaacaccctcacagacacacccggaaacaatactttgcatccttcaacttgacacttacccatcacactgaggtttgcagtgacagaaaggaaggcctttattgtaggtgccaaacaaagaggactgggccacaaagtgctcaaatcctgaccttcccgatggcttgcaggaaagtgtagtgcaggggtaaatttcaggaaaggagaagctacaggcaaaattacaaatcaatacacggaggttgcacattggtttaggcctaaaacagctggatatcttgaagcaagggcttacaggtggtaggtagattcagagactgtctgatttgcaattggttacggaagagaagctttgtttaaaaatctggggtcagtagaaaactgttaactgtctagcggctgtgactttctccaaggaagaaacttagaacaaaagacgatggttaaggttcagtcttcacctccctctttgtttttttgtgcatatatatatatatatttaattatactttaagttctagggtacatgtgcacaacgtgcaggtttgttacatatgtatacatgtgccatgttggtgtgttgcacccattaactcatcatttacattaggtatatctcctaatgctatccctcccccctctcccaaccccatgacaggccctggtgtgtgatgttccccttcctgtgtccaagtgttctcattgttcaattcccacatataagtgagaacatgcagtgtttggttttttgtccctgtgatagttttctcagaatgatagtttccagcttcatccatgtccctacaaaggacgtgaattcatccttttttatggctgcatagtattccatggtatatatgtgccacattttcttaatccagtctatcattgttggacatttgggttggttccaagtctttgctattgtgaatagtgctgaaataaacatacctgtgcttgtgtctttatagctgaggtctatgtgctagtgggtccatttcatgggggtcctcagtggggccttaagcttctgaaaaacaactctgggacaaatgttaacatgttatcactggtttctatggggaaagcaaacatttttggaactctgtcttcgttaactattgttttagacctctatgctttaacaagttgcttattcacatctgggtctagctaggttcctggaattttccttgaaggaacttaggcttttcctttatttccatgcttgggggtctgcaggctcctaaaaaggaggtcctcattctgtctcgtggatgaatattttctttctctaaaatggttttctgtattttccaaattttctgcagtgaacatgcattatttgtataatcagaaaaacaatgaagaccagatcaattaaaacctaacaaaaagaagcctagtgccaatagtcttgatatttccttcttatatgcaaagaataaagacattatatcatcttattctagctttaaaacaaaatgaaacaaaaatgctggaacaaccttgaatagatatatatcataagatgtgcaatcagtatcaggagctgcattatcctgtgcatggagctcagaacagaccacaagattatgcagctccctttgttacttgtcattcttatgaagctgtcatctcatttctcaaaggaatttccagtctgtaatgttacctttcccacagtgccttatttccaacaaaaatagtaagagggcattaggtctcaattccctttgctttatattctctccttaaccgaaaagaaaactaattaaatatgttttccttgatcaaatgcttttttacccctaagcatcctggaaagtggtctcagagtcaatattttggggatgatgccttctctacagaatgaatttctccaagctcaactaaaatggtcaaaggtctatccacattttaaaaaattaagaatttaccagacacttttctttctatttatttacttttgaggataaggtctcattctatttctcagtctgtagtgcagtggtgcaatcgtagctccttgaaaccttgaacgtcttggctcaagcaattctccagcctcagcctctcaaagtgttgggattacaggtgtgagccactgtacttggctcatttttttcctttttaaaaattctgttgttgaattatttaaatcatattaacagcacataaaggttggtgaagtaagaaagtgggggtggttagagagagaaaaagggaaagcatacctcttttttcttattcatttttcatttaaaattatgtgtgagttcttcaatagactgtcatagtactcaggaacaggtgcgtgcgtgcgcacagacacacgcacgtgtgactctacccactccctgataaaaatgtgttcaatgtttaactttatttttatttatttatttattatttattttgagacggagtctcgccttgtaacccaggctggagtgcagtggcgcgatctccgctcactgcaagctccgccttccgggttcacgccattctcctgcctcagcctcccgagtagctgtagctgggactacaggcgcctggcactgcgcccagctaattttttgtatttttagtagagacggagtttcaccgtggtcttgatctcctgacctcgtgatccacccacctcggcctcccaaagtgctgggattacaggcgtgagccaccgcgccctgcccaatgtttaactttctagcaaaaagacaaacttcatgcaagcaggaactgggctcattttgttcactctgttatctcccatctttggaacagtgagtaccgcagaggagatggtctgtacatattttctatatgagaggtagatttttaaggtataaggaacaatagttggtcaattaaggagcctcttacgtccttgtatgaaaacaatcctatattgttttactttgtcttgaattttgtgaaccaatatactggctactatgttcagagaatgtagagcagccctggtatatcttctttttatttagaaatagttttaaacttagaaaaaaacttaatacaagaaactttttcccctaaatcatttgagagcaagttgctcacatgctatcctatcaccaaccaatattttagtgtgtgtttccacaagcgaggacattattctacataactgcaatacagccatcaaactcaggtcattaacattgacatattactaccatctaattcatacaccccattcaaatttcttcagttgttccaataatgttatttatgacaaaaaatccaatccaggatcacacattgcattgaactgtcatgtgtctttagtctccttccaactgggacagttcctcagtctttccttgactttcatgacactgatggaacagtttggaaatctacagatgatctatgttttaggatgtctcccaatttaagtttgtctgatatttcctcataattggaccaggttattcatttggggcaagaaggtcccagttgtgatggccgcatgtgtgtcacacactccatcaggtggcattcgatcctgacttttcccattcgtgttgaaattcactttgatcacctcccagtttctccaatggaagttgctcttttccttttgaaattagtatgaatgtcatgggaaggtaacttgagaatacgtaaatatctaattcctcggccaggtacagtggcttacacctgtactcccagcactttgggaggctatggtgggataattacttgaggtaaggagttcaagaccagcctgggtattatagcaagaccctgtctctacaaaacgtaaaagaaatagctgggtgtggtagtgtatgcctgtagtctaagctactcaggaagctgaggcaggtggatcatttgagctcaggagtttgaggttgcagtgagctatgttcacaccatagcactccagcctggatgacaccgtgagaacctgtctccaatttaaaaaaaaaaaaaatccaattcttcatgaaattcttactcattagttctatatccattgatatcccttggataaactattactatgatgattgctaaatgatgattgtctaattccatcattctgtctatatctattgacattctactataggaagatttgttctttctcattaatttttattggcaaaatctcatgagttcgtattttgttcaattgataaaattcattatcattatccattttgatgtttaaatttatttgacatcctggaagccctttcaagttgacatcagtttcatttgtcacagctatgattctctgagaacgttcttattttctggctgaaaacactctgtacttacctagttctgccccagccctggtatcaggctttattctaagaagctttgatttcttttggtagagaatggtatttagaaaccaagaactggactctaattgtgctgattggttttgagttatcaatatactggctttctcagagaacacagcttgggtatgtatatatatttataaagtttaattaacttttctcccttttcatgtgtgtacaccctttctccaacagtgtaaaagttggttactgttatacttagtatatttactcagagatcacttgatttctgagactttgtgccaggcctctactgtcactcttacctataagcaccctcttcacctatttcaagctcttcttcatccagtatttatgagccacattcaatgtggcactcacattccaaagatagtagatagagaagtgaaccaaataaacatggtctctgttcccatgaagcctgtcttctacctggaaagcactgagatagatttgaattttaattgtttttttttttttttttttttttttttagtggtcacaaaacttcatcaggcagtcacataaaccataaggaggttaaaggcaaacatatgcagaaacattttaaacagattcacatgtaggtcaacattcatagagattttccagcaataatgcttttctagaaaaggtttattaaagatatcagtcaattgtaagaattatgatctataaatgctattcatcaccacctagaatatatatcagacatcaaagtattaacttctttgagtaattttttttctagttaaatcttcattgtcagacctcacttagatgcaaattctttaagagaaatcttccagagaagcttaaattataaaagccatataagtagaaacactgtatgtaagtggaagtggggtctaggaagctttccccaccttcttccccttctgtgcaatccatggagcaactctgtagaacacagtttgaaatcctgggctacttaaatgccctacttttttttttttttagcaaacctgaaaaacttcattcctttatgtggtcaagaaataattactatgcatcttttctgtacctagtaatatactaggtgccatagaaaaaagaacagaagcctggaaaggtccacttttatctcactgagtttgcagacttctaggaatagaggcagcatacaagtaagcaaacacaaagatatttccagactgatgtaaaacatgtgaagaaaacccatgaagctgcaagggagcattgtggcaatcctaagcactttataatagcgtggcttggaagaaccttcataaagtggtgatactgaagctgagtcctcggtaatgtagatccaggcatgagaatggtgggcaaaagtgataagataattttagacagagggaaccgtgtgcataaaggagctgaggcaggaagaagcaggcatattcctaagaaccttgcggccactatagttgggaaccatagatcaaggataagaggataagttagttaggaagaggccagtttttgcagggctttgtttaggagtttagatttattcttagacatgggaagtcgctgtagaataatgattgaataaggtgttcgtcatattttggctacctagcagctcaccttcttcctgtgtttgggaggattatccactgtatgagtcctgggaatcactgctcaccccctgtctccttctcctagtggagttcttctctctcaggcacttacagtgagagaagcatggcacaagatcagggcttagtcagtcctatgcccctttccagagctttgaacctggaggagagtaagggagcacagcagaggagaaaatttcctcccactgcacagtcctaattaaatggctcttcctgggccatggcaatgggtcctgtggcttgtcttccttggcaatgggtcctgtgccttgtcttccttggcaataggtcctgtggcttgtctgcctttgaggctttatttctccaccctggctccccagcctttctgtccatctggcaagtgctcaacattcctctaactaatttttctgcataagttactatcttgtatacaatcaagaactatggctgttgaaaaagatatctctggccactagatggagatagagaaggctagaacagaggaaaaggtggccttgatttgggtaacaaggtgatgataatggagaaaattcagagtagagatgaatacccaagagtaggtaaaaaaaaaaagcctctcaggttggggaagaaaacagctgttagtaaggccgtgaactttccttcacatgagaattctgaagctagcctttggctacaacccaaagtatactgaattaaggttttggtaaaaataaagccactgtttaacaagctcccttacttgcattttcagttatagcagatagtgagaagcatatacgaagtagaagtgaggtgggaaaagtagcactgttagagtccattggttctttttacctttgcatcctttttgaaagcaacattttcattcagctcagcacaaagatgcatgttcagaatcataaccctaggcgagcagttgtaaatactctggaagatgtggtttgttttttgttttgtttgtttggcttgtgccgcattgaaaaatgaattagttgtcaacattaacaaataggaagactggattttattgcaaaaatgtttagcttgggctgggtgcagtggcttatgcctataatctcagcacttcgggagtttgaggcaggaggatcactttagtccaggagtttgagaccagcctggacagcatggcaaaacctagtctcaaaaaaaaaaaaaaaaaaaaaaacttagctgggcatagcggcctgggcctgtagtcctagctactcaagaagctgaggtgggaggattgcttgagcccccgaggtcgaggctgcagtgagccgagatcacaacagtgcaatctatcttgggtgacagagggagatcctgtttcaaaaaaagtttagcttttctgtagaagaattttgagcagctccttctaaaaaggaaatgtacacctccattttgccacagtcaccacactccctcttggctctcttggcaaatatttgtgttacttgttaactctcacgggcatttgattttgaaatttcctaaagataccaacaaaagtttgaattctgtttcatgtatgtttaaaaatatgaacatgaatgacaatatgaggaatattcctattaatgtcattaaaatacttacatggtaggaattaaatctcattatctgactctttaataatgaagatggaatcaagcattgttctatagccatatttcctgataattgtttactataagatattttttgatagtcttatgaaacaaagagatgaggatggtattatatagggcaaattttggctcaggtaaacatgattgtttttctaatttgggaggaaaattcttttgtgaaaataatccaagagttgctttgccttttcttctctcatgaatagttaacttccgaggtacttgggatcttcttttgaattttaatctcttttcctacttttctgtacttctagacatgttcaaagtcatatgaattgtacagatgtaagacaagtcttaaaaaatcatagagagtatcacaggaaagcattattgaaaagacattactagtagatatttgactaaccatagggttttaagttgaaaataaattggagaactttttgatcaactttttcactgggcattggggaatctgagacattaatttttaaaagactttactacaaccagagatgactttatagtgagattcagagaacatgctactggatttcaagttcaattaggataaaatctcagttccaactcgtgcatacagttcctttgtaatctgtttcttgcctgcctccctgactctcacctttttctgacatggctcactaaattcagctcacacttttagaacacactgatgtgggaggctaggcttagagtgaggcaagggaaacatcactttacattttctccctcaccccacctcccaccttaagtttcgtgccctggtaaggcactcaccacaggcacaaaatttaaggggacacaaaaacatagtaatcaagagaaatcacatttaatatagtattaaaaaaataagtatcaatgcaaaaatatctatgatggacaacctaccaacattttaaatacagatcagtgttctgtgtagccacagtggatcttgaggtgaagggaattacatgtacccatattcaggttttaattttttatttatttatttatttttttgagatggagtttcgctcttgtcgtccagggtggagtgcaatgatgtaatcttggctcactgcaacctccacctccccagttcaagggattctcctgcctcagtttcctgagtagctgggattacaaatgcctgccaccacgcccggctaattttttgtagttttactagagacagggttcaccatgttagccaggctggtctcgaactcctgacctcaggtgatccgcccgcctcggtctctctgggattacagacgtgagccactgtgccctgccaatgtagtttttaatcgttattttttttttctgaaacattgaagttgtggaaaatatattgaataattgaaaagtgggtgtattaaaacggataacattaatataggctcagatatcttatactaacaacagaatttattacaattttaatttcctggatttaatggaagcaaacttgttgatactattctaaaaaatagctcccttatttatctcattttcaactgagagattcactatgaccatttctcttgtctaagcgaccaccttgaataatcttcaataaagtaaattaagtgttaatatggcctctgagaaacagcacacccttgcccacctaggttataaacaaattgaggacaaaatgaaatgacggagtgatagctaaaggtcaaaatatcaccttgattcctacagaggctgatttggaagacttgcttgaggcttattcagacaagaaagcttattagttctaaatctcatggttgggtagacaaaaccagcatatcagggcagggctccttcttctccttccctaagagggcagagctgtctctgaagaagcagaactagaggctactcccttagggcatggagctgggtcctgagacaaaggatgcaaatcagttaaacatgaacagttgtagcaggatgagccgcagataaaacctctcagacactgagttgtagaaggaagggctttattcaactgggagcatcggcaagctgctgccttaaaatccgagctccccgagtgcacaatttctgtcccttttaagggctcacaacactaaagatttcacatgaaaaggtcgtgattgatttgagcaagcaagggatacgtgacaggggctgcatgcaccggtggtcagagagaaacagaacacggcagggagtttcataatgttcttctatacaatgtctggaatctatgaataacatcagcttctaaatcataagttgatttttaactactgggtttaggccaggcaggcccgggcctggtttcaggcctggcgccgggctgcctgtctttggttttacttccttgttgtttttactgaatataaaacaatatgagagggggtctctcttctctcacaattattctgcctaaatttaccactcagatgtctctgcacttattctcaagcaaagagacttggggatagagggatgccagaagttataccaatgaaggaacatcagaaatggaaaaggaggattccccactaatgcaaacaaggcacattcggccccaggacctttgcttctgctgctgtctctgcctgaagcactcttcccctaggtcttcacatggctggatgcctctcaacattgtggtcaaagctcagttgttattccccaagaagtccatccctgaccactctacttaatgtggttcacttgtttatttttctttatggagcatctatctaaaactattttatcaatacaatgtaagttctctaatggcggtaaccttgcctgtcttgctgagcacctcaaagtgaccctggcacagagtaaacaggtgtctgaggtgagggttttcagatgcagagctggagatcagttttcttgtgcaaatgctttatggggggtgggggaggttctgaagagaactgagagatgtgggacagtgcaggggaagaagctgataagaaggacatggagtcagttctagagtgatcaaccctcccattttacctatgcctaaagggtttcccaaaatttttagtactaaaactggggcacttttaggaaaaccagaactgttggtcacctagcctcagcctaatcccataggggagatctggtgcatatatttaatcaaacagttgtcccactttgaagccagtgagccttccttcagtataagtcagtggaggtggctcccatcagctgagggcaattctcaagaatggctgtgagctatcagtaggcaaaattcacagcacctggggaacgggttcaccttctggaaaagggattctaggtgaggcatcaacagagtagtgtgtacaccattacagcctgcaataaatatgtgtttaatgaatgagtaaaatacatcatgaaatttacagtctcatcccatgttaacgtggctcaagcaacatctcttttgcattttggacttttgtgtaatggagatgatagaagtttcttaagctcttttatcatacgccttggtaatattttagctttttacaactagaacacactgttccttcttatttgtgtatacacaaagtttatgacttgctgactcagattctctcagcctgttaatgctcgctgggggtgagttagggactttgagaggctgcgctaacttcttaatgaatcccgaatgcctcgtaggaaatgttggtactattccattgtgacaaatggtatcttagtggggcaaagagacattccttctacaactccaaaacaaccaacgtaaaagatgtagagaggcaggtaatccattggtcttatttacttaatttcaagtaatttattttaggctttttccacctgctacttacattcaactttaaataacaaaataattttaaaaacagaacatagttatctgtatatgtgtacagttttaagtatacatgcatatgtgaatgtgtgtatatagaaatgtgtagatatgtatgtgtatgtataaaacttctttccttagacaatattaatggcaatttagaaagatacataattggcatcaagattataaaaggcataggagaagaaaggcaaaataccaacatccaccattatcaacacaaaagaactggagggaagcagtgatatgtttaatatgaaaacatatcaagttccatacacttgatagagtgagcccccaaattctctacaggcaacttatacaaaaaggaaaattacatagttttcagtgcttataagctaaagacaaactgattctttaggaaaggtatcagtatttctaaattggagaaaaggcaaatgtctcaccaaagtctttatatgatctatatgcagcagacattgtgcatatatattgctatatggcaatatatatgttctggaaaaaccttgcagaattacttggtaaaaataacagggcttatgggaaaaataatgttaggcaaaccactcaaaccatgcaactacataatcagaaaggccataaaaataacaataatcctaaaaataatgcttgcataaataaaaatgttacatcttaataaagaaataatacagtaagtataggaatttatatcttttatacaacgtgaagacagcttattagaagaaagtgtaagaaaggattgtgcaaaattaatagatgaggaaatgcataaagagcaggaaggaccatgtaaaaatcatttccaagacagatctccaagtttaatcgaggatacagaataacttggattgaatgggcatcttgtatttctcttcaacttttcatgtgcagttttgttggtgtaagtccactggagctgtgtgttaacatcatgctttatttattatcctcatataagctcgtgtacctcacagaggcagctattgcagaacagactatactttttaatatgacatatgtgtgggtgattcagggcactaaccaaaccacttctccaaaaaaaagttaaaaatcatgaataaacaaagatttttttgtttttatacacataattcataatttaaattaccttgcttttgtttcattttgtggtgctcagttttgcctttacaaaccttcataatagatatcctgctaattgacaggttcaataatgtttagtaattagcaaagagagtatgcttttcataatagtaaatcctttgtattttggtttcataaaaatttatttatgcgatttggttgtttgaatcagaatataaattggtaaactaggtcaggaatacattactgtttttcttaaaaactgctcttttgatagtgggattttctgagtatttcatactgccattcttataccatattgttaagataagcaacaggaaataaaacaatttcatctactgtaagtttatcataagatcttggatactaatttagcatgcagtaggttttggcaactttcccccttaacaagcaaagattgatcctcaggaaaaatcaaagttattatatgggctgttccattaatagcacttgaagaaaaatgaaaatgggcagctagtctaaatgtaaatggcatatccagtttggaaacaaatggctaaaggaatgaagaactattgaaatatatgcctacctttgcatttggtcatttaatccaatattatgaagcaatgctagaatttaccagtgatatgtatcctttcatcagtatgtgggggatatatgatgtgatttttatgtcattccccttagagggagataatgcacagaactcacaaaaattcaaataaagggatgttagaaaaatcaaaaggggaccaggtgcccatagctcatgcctgtaaaccaagaactttggaaggtcaaggcaggaggattgcttgaagcaaggagttcgagatcagcctgggcaacaaaatgagacccagtctctaccaaaaaaaaaaaaaattaaaaattagctgggcctggttctacatgcctgttagtcccagcttctctggagtctgaggcatgaggattgcttgagcccagtagttcaagactgcagtgagatttggtggtgccactgcactccagcctgaatgacagagtaagaccctgtttcttaaaacaaaaaaggaagaaaaatcaaaaggggcatgttatcatcatcatcgtcaagtggtggcaagtaacttggaatgctagcattttcttcttagaatgaagttacttctggaatgccatgctgtatatgttaattttgtaaatctgtaaaggtttaagtttcagcaagattttgtttttgttttttctttctctcttgaatatatttcttctgagaatttatttctaagacggcagagaaacaggagtctgacagtccctggctgactttagcaggttagagagctgagtaattcaggaagtgtgtgattctctcctggttgggcaactgggagtttggatgtggagctaagtgaatctcactcactgtgtatctttttaaaacatgcgctgctatagtttgaatatcccctcaaaactcatattgaaacttagctgccattgtaagagtgtggagaggcagaatctttttttttttttttttttttttttttgagacagagtcttgctctgtcgcccaggctggagtgcagtggcgcgatctcggctcactgcaagctccgcctcccgggttcacgccatcctcctgcctcagcctcccgagtagctgggactacaggcgcccgccaccacgcccggctaattttttgtatttttagtagagacggggtttcaccgtgttagccaggatggtctcgatctcctgacctcgtgatccacccacctccgcttcccaaagtgctgggattacaggcgtgagccaccacgcccggctgaggcagaatctttaagaggtgattaagtcatgagggttttgcactcatgaatggattgatgctgttattgtcaagtgggttagctattgtgggcatgagttcctgataaaaagggtatgtttggcccaatttccttgtgttctcaaatgcttccttgccatgtgatgcttttcactacatcatcaaacaccaggaaggcctttaccagatgcagtccctcgatcttggacttcccagcctccagaattgtgagttaaatacacatcttttctttataaattacccagtttgtggcattatagcagcagaaaattaattaggacataggcagattagaaaaatgatctggagatggaaatttcatctatagattgagggatggggtaggggcaaaattgtgattaagaccataggttctgaaatttgactgccagagttttaatcatggcttcattgcattttagttcttgtcatcttaggaacatttgtcaatctctaccagcctcatctttctctgtagaacaagaatgattctcatatgaactgcaaaaggttgttgtgaggactgaatgagacaagcatgcaatgtgcccagcagagtaccaggtacataggaagtactcaatacatgttcacttctatcattaccattactattattacaccgtctgtaggcccaggctgtagcaagatgtgtttgttcttccagagaactagaagcaactctttggaatgtgggtactatggataaaatactatcatcactttcctaaatcttggaatttcttcactacttatttgtgtgtatctgacagagtttgtggtttcctataaacaagttgtgagagggaacaattttcatgtgagcttctctttttaaaaccattttggtggcatattattcaaggaatagtcataataataggtcaaagagaaacaaatacacaggatattaaagagcttctcagcatttgcttagatgatactactgttgtgagtggcacagataatctgtctattcatgaatggttgcaagcaattagatgattcagtagagataatcaaatgctattctttttttaacttaagctcttcacttgcctactggtagtactggttttgtctagatggagtttagaacttctatattatttagtgtacaaaaatccacccagggctgggcgtggtggctcatgcctgttatcctagcactttgggagaccaaggctggtggatgtgagccctagagtttgagaccacccaggacaacatggcgaaaccccatcactactaaaaatacaaaaattagccaggcatgttggcacactcctgtgatcccagctactcaagaggctgagacatgagaattgcttgaaccctagaggcagaggttgcagtgagctgagatcacgccactgctgctccagccttggaagcagagcaagactctgtcccaaaaaaaaaaaaaaatcaagccatccaaagtcataaaaatagtctgggtcaccaaaagaagccctgtgacaatttgacaatttgaagacagataaatactgtatttcattttaattaattaaaagaaattatagcatgatggcatgtattttaatttctcagataaatgcatttaaaaattagtctaatttttatattagactaaatttgactgaattgatcattattttagattaaaatatgttctggaagatttattctttaaaaaacaacaaatactagaaattacatatgcaagtgagtttattcttatcaaaagtagaggcattaactaaaaattgtctataaattcttctttgcaaattgctgtcagcctccgcaaggttttattgtcattttcagtaccctctgtagtggccaattttatccttttagtgcagataatcactgtcttgcagagatcattaatcctttctctcttttcctctattaaattaacttagtaaaccccaatgtggttgaatccaaatattcactatcttcaaatgtggcagacacagctatttgtttaaatacattgttgttttctcattttttctttactaacttttcaatggttttgttcaggacaacaaccttcagatgctggctttcctgcctcccttgaagctagggttggctatgtgttacatgccccacaactaagatgaaaatagaaatctggtggatgtttcttggaaatcttttgttttcctaaaagataattactgaagcaggtgaggcccctccttttttattctggccatgaatgtggatgtaatgaatacgaaaaccaatttgctgagcatggcagcagaaaaagatacaaaaagcctgcaacctgagggtattacttagcaggtgaatcaataccagcaagtgcatatctctgttatgtgaaagaaaaagaaatctctatttttgcaccacctgctgtgtgtcagttattctgtttttttttttttttttttttttttttgagtagctaacatagctaaccacattcctacaagcacattaatagttgaacattgttggagaggatcaatctttgtgattgatctttagttcatacttgcaggaaacataaggatgcagctttcagtcttattatgctttcctggttaaggtaagaattttgttttgtttcgtaaatctctttagtctcatatctcctctcaacaacctgaaaaattcactcaaactttgttcagaaaatggaagctctcatcaatgctctcccttactctccttcatctctgccctctttctgcattattactctccatcttcacctggccacagaaaaaaaaatgtgcccctgctcctcttaagcaagtctgctgttgcctatctggaccttcatggcctttgtccttcacgatgacattttctctttcttttctcctctttcttctacatcttcaatttctcacttgccactagatcattatatcagaacatctttacaaaaacttgccttgacctgctctctccttaggcttttgacccatttcccttctctcctttgtagtcagacttgaaaatgttttacacatattgtctccattttctaaagtccttctgtaccccattacaattatgcttatcttcctgccagcccactgaaaccattttcccccaaatcaccaatctctgtgtagacgaatccactggaaaatatttttttttctttacttacctattggcaacaattgggaaagtttaccaatatctccctgtaatgccttcttatttttttgttttttaaaactatattctcagtttttctctcttcctttctagctacttctttctggctttttcttttccataagatcttcaaaatattaaaatttcaaggctaggtcttcatccctctcccttgtttgtttatatttatccctaatgatatatttccccaattcgccaacacatgtatctgttgatgatctctcctctgagctccaggcttatctactgaaagatgcatttgacatttcgtagatacgtaatagacatctcacacgtgaaacatcaaaacaaactagatgatccccccaatttcaactctgttcagttccaatccctctgtcttagaaattgcattatcatcgtccactatttaaaaatagaaatatggaagccgttttttggcatttcccttttttaaagttttttatatccaatttattgacaagttagttccatccttagaacctatctggcatacctcttttactttgtttcattacacaacatctataataccattttaagaaataaaattaacttgctaaaagtgctgaaatgtaaaagaatggcaataccaattgatagcgaagctatgggcaataagatctcagacattgggagagtaaattttaattggcaataccactttgaagaggcattgcctgttaaagagatgcaatggttctatttccagagacttaccaacaagaatgagtgggccgggcacagtggcttacacctgtaatcccagcactttgggaggccaggacggttggattacctgaggtcaggagtttcagaccagtctggccaatatggtgaaactgcatctctactaaaaatacaaaaaactagcccgcatggtggctcgtgtctataatcccagctattcgggaggctgaggcaggagaatcacttgaacctgggaggtggaggttgcggtgagccgagatcataccattgcactccagcctggctgacacagtgagactctgtctcaaaataataataataataataataataataaaagaagaagaagaagaagaagaagaagaagaagtgagtgtatgcaacagcaacagttaacatgtacaaaaatgttcatgtcagcaatgttcacaatagatccacttgggaacaaaccaatgcacgttgaccatagaatgaagacaaacattgaagtatagacacaatagacactataaagcaaaaagaaaaaaaaaatgaacaaattacaggtacatgaaacatgaaagaaacaacatggatgaatttctaaagtgatattaaagttgtatcagtagtatttagcaaaagatgctagatgcaaaatgatacgaggaataatttctttatgtaacatttaataacctggaaagctaagttatggtgtttagaaatctaaacttagatgggaaaagtataaaaaacaaagaagaaaaaaaaaaccagtattaccgtaaaagtcaaaataccagttattcatggggggagggtggtgcccctcataattcggaaagacacagtttcaaacaccataatcccagatgctgaaaactataaagtctaaatcccccaaaattacaattctaaaagattaaaattctgaaaattgaaatcatgaaaggtgaattctcagcaagggattagtgcaatttcaggggtcaccaggatagctattgttagctgtttgatgttaaggggaactattaccttgtttttttttttaatttgaaaattaattatagtttaaggagatgcacatgggggccaagttgacaaggggtgggtttgtggacttaattttaggtgtcacctcacttgaattaaggaatacctagatatctggtaaggcattatttggggtgtgtctgtgacaatgtttccagatattagtgtgtgagtggactaggtggggaagatctgccctcagtgttggtgggcaccatccaactggcaggggccctaaaaataacaaatacagaaagtaacttggtctctgagagctggggccaattttcttctgctgccttcgacattataacgccaggcttgccagcctttgcacttacaccttggactgagagttacaccattggattctctggttctcaatgtaaaaatgttggaactttcccaataaatgaagacatcttctttttgtacattcacatctgtgaaagataaaatttttcaagatctcagctctttaggtgattgattgcatgtgctgtggagacccgtcacagttgttgatgaatcccctcaaaatacttaggttgtccttcatggtatttttttttcttcttttgagacaaagtctcactttgtcgcccaggctggagtgtaggggtgcaatcctggctcactgcaacctccacctcctgggttcaagcagtcctcctgcctcagcctcccaagtagctgggattacagacatgcatcactacacctgactaatttttgtattattagtagagatggggtttcgtcatgttggccaggctggtctcgaactcttgtcttaggtcatctgcctgccttggccttccaaaatactgggattacaggcatgagccacctctcccagcctctctccatgacctatttatttaagaatatggttcacctgctcataactgttataagcaggcaactgtcattagtatatctgagtgtttgtgctcggaaaactatatatgctattattgcctattttattgtgtaaagtggcctgcgaagtgtcctgtcatatttttatgtttctcaaacaattccccctttaaaacatgtagataaatgtttagagaattttaaaattgttttttccagaattatatttttaggatttcgatcttttgggatggtgatttttgagattttagaccatagaaattttcatcttttgggattccaacatttgggattatggcattcaggagtgtgtcttttggtatggtggccaagatcccagagtaggggaaggtagctttgagtgtgatggagcaggcaagggttttctggggtgcaagcagggttctgtttcttgccttgcatttgcttttacaatgcatgctttctaataattaatctatacttggatgccctgtgtatctttctatagatagtatataaatgcattacatatttatgtatatttgtatataaatatctatgttttacaagaaaatatacaaatatttgtatgtgaatatctatgttttacaagaaaatatgcaaatattaaatatataaataacttccctgaataaaaccatggtgtgtagaatgagatcctaataccttcttgtggctgacgaatctctgcaggagctggtggggctcctctgcagcctcatcttacagccctttgctgcttgttaaacacattggctctcactggctttctgccacttccttgagcgcatcaagctctctgctgtcccgtggccccttgtcctgttgttccctcttaaaggaagacctcccctggatctttgttcggtgagcttcctgtcatcccaagtcttaggttaaaatgtcagcccttcagggaagagagcctatataaagcttcaacctgttatcctctggcataacaacctgtttgttttcctctttgctcataagataatttgtgattcctttggtactgcttactaatttgctgacaatattgccagctatattggcggtctagaaaagcagagattttttttctttgtttgctcctgtgactctggtgcttgggacacagtaatgcttggctcaatattattgcaggatgaaaatcaattcattggatatagaatcgtaggaagacatcctattagatgacatatgtaagcaatattaactataatgaaggtggaggaggaagaaacattagaagagagaatgaagtagaagataaactagaatcacatcttacgaacttgttatatccgcacggggtgactcagctgttgtcaagtagtgagtcacagcagggcagactatgtaggggctgccacccggcttttactctgtgtgtttcctgtggataatatctaattgtatgtgacatgaatccagccatttctagattatccttataagaaggcattaactagaactcctttcagttttcaccacagatcaccaacaatggttcctaatttactttaagaaaggccacaatctgtcctcaggatgactttcaggtgactgacacctgccttggatgggcagccactcagcacccatgagctgtaattccctaggatctttaaaatcttggaccttcaggtactgccctggcctctttgcaagggtggtcctttacattctcaatcctccagcaggtcatgcaatcacaagagatttgtcagtctgcataaaacatctgaatgctaatgaaatggcccagcacattaattagactgtcaatagatcagccttaaaagctcagtttctcttctcttcatttattttcaaacaaaagagcagcagcacattaggaatgaaatcagaatactaattaattccaattcagtaaatttccaaacaagctcttcatatccataaaccagaaatattttataaatgattttgtaatattaaatgttacttcttttctctattattcataaggaaggaaaaataagttcgatgtagctaatatataatacatatatgctctaaagagatttcaatagccatgtatcagtaacactaactcagtcaataaaatatggatctcaataagaacaacatcagtttttcctcttaattacttatgagaattgatgtctgatatcaaatctttaaatttaaatgaaggaggtatcaattttatgacaaaacaagatttattaaattcaaattgtcaaattttgtaggacttgtttcaggcagaataatgtaaccccaaattcattaagaaaatgtactttgtaaaaagcagaaaatttaatttgagatatcagagtataagttgttaaccattatacaaataattgggaagcttttggggaaaataatcactgatgttattttctacttgaatcaacttgtgattaactgtcattagaagatcgtatgaagcaccaaatataactaaataaagacaatgtgtaagacaagatttgcagcagttttgagattgctacttcattttatggttttgatgctgccaatgatcgggtagcattttctggtcttgaggcaaattcacaaaaaggcttatataccgaaacactctcaaaacaaaattggtaaaaactgtgggcttgcttttctaaatcatacttcttttatcattaattcctattgatgatctgaataggggtatatacatttttcttcatggtattatgatgctgtcttgtattgttggtagatgatttgacaattacaaaaaagcactaagaaaaataaacatcactcataaatctatcaccatttatttatatttccttgcagtctatttgtctatatgtgttatataatatataatttgtatacatacatatctgacatgattatatattttcaaatattagagtatatcatactttaaaatagtttacatttattgagatataatttatgtaaaattaaatttatttttaatcctaaaccactcatgactcctcaatgtagtcctatctggttatgatttattttcttctaaaatactactaaatataatttgccaaggatttattaggattttaaatgtatttacagctgagttgggtctgtgctcttcttattttatttttgtgcggtttcgtatagggagtatgtttatgtatgactgaatcaatatttttcaaacatttctgaaacacctcctataatggagatcaatgttcttttgtaatttatattatcctgtatatttgtatatttgtctctctatattgtacattataatttacatcataatataaattatgttatatcacaaaaatttgaattttgtaatttatattatcttatgaatgagtgaaaccagtatgttcaaatttattagcagagagttggatattttccacaacatttaagagctcctccatatttaattttacctcaaatttaagttccttcaattccttaatcccctcttttatgtcaaaaaacttttaaatagttgttttgaaatcatcctttaagtttatatatcatttatttttctaatgcagtaatcagtgattatttttattacctttccttgttttctttaggtaatctattcttttaaaattatttttccatttataataaaagccattgaaacccatgatatgcctcttaatatcttgttcatcaaaatttgtctcaagtttatttaaaaaataagtagcataataaataacacatatattgtccttcacctatatttaccaattgttaatttttgctagtgtgctctctctcttgctctgtctcttgctctcttatgaaccattcgggagtaatttgcagacatcatgattcttccaaactacatgctcaacttgtatctgctaagtaaaatgacattctcttacataaatcatagtacatttatcaaattcagaactttaacattgtttggattctattttcaaactcacacttcatatttaaatgttcgagataatgtctcaataatgtcctttacaggcaatacttttttccagttctgggatccaatccgtagtcatgtatttcctttagctgtattgtccctttagtttcctttaattaataaacagttctcaaccttttgttgttgttgtttatattggcaatgttgaggactatatgatagttgttttgtagaagtcccttaattttggtttttctgattcttttatatgattggatttaggtggtgcatttttagcagatagacggtataagtgaagttgtgtcttcctcaatatattacatcaggaagcatacgatgagcccttgttgagtaggttacttttgttcacctgtttcagatggtgcctgccaaatttatatactgtaaagttaccactcataccttactgtaattactaagtcatctatggaagatccttcgacgcataaaggtcctgtccacagcaaagagtttgacctccattgctgatttttgcctgaatcagttattgttatggtctttgcaaaatgatttatttctaactctttcattactaatatatttattagcatggtgagtattctactggaaaacaaataaaactgccaaaaaacacctcctttcctccttcatgaaagtacatacgtatgtgtatgtattagtgtagatgcgtgggttcatttttatttagtatatttcaatcagtttctgccagtactcattgctctgctcaaaatttgccagatttgacatcaaacttgttcttacgtgctgttggcatgttctcatcagtttctgaatactttcttacttcttggcaagaaatgtgttcaaaaatcaccttacattttttgtttctagccacagaatcaatctgatactagatatcagcatgtactgatatgcactatcagtagatatcagtatgtactgatctgtactatcagtagatatcagtatgtactgatctgtactatcagtagatatcagtatgtactgatctgtactatcagtagatatcagtatgtactgatcttctatgaccctggatgagagaagtaaacagggtaaaatgggatatgcctctttatttgagaagggatgttgtcataggggcatctgctttttttgtttgtttgtttgtttttgagacagagtctcactctgtcgcccaggctggagtgcagtggtgcgatctcggctcactgcaagctctgccacccgggttcacaccattctcctgcctcagcctcccgagtagctgggactacaggcacccgccaccatggggcatctgcttattttattggacggaactgtggtgctttgacacctcaaggagagattaggaaataattttcttttgctcatcaatacaacgtttgcctaagcaagactggaaatctattattagtgaaagaaagataaaaatgactattagattggcagctagttatggttgccacaatatgatatatcaacctgtgtcttatacatcaatatgatctataaaagagcatgcaggctattatgctctcttaattcttgtttttgttttgtttgtttgtttgttttttctttttttgcctgagagagagagtttcactctcgtcacccaggctggagtgcaatggtgcgatctcgactcactgcaacctctgcctcccaggttcaggggattctcctgcctcagcctctgaagtagctgggactacaggcatgcaccaccacacctggctaatttttgtatttctagtagagatggggtttcaccatgttggccaggctgctctcgagctcctgacctcagatgatctgcctgcctgggccttgccttaattcttgaataacatctgtgcttaacttcgtatgcttggagaggaaaacagatctaactttaaatctaactcatagtatcctgatgatctttttttttttaaactttcagtaaacataaatactatgaaaacactaaaacgctgaaccagaatattatagggtttgtaggggagccgataagagttatttattctagtatattctcttgcctattcaaatgttgtagtctaaactttatgcatatttcatattcaagaagatgttttagagagtatcaatatgacttttgattccaagagcattctaacccttgctcacctctacacccaattctcattttcatgtttggttctgtccattggctttgctttaacccttacctgctttctcaagcttctgttcttcaccctccaactaagacaattatgctgaaaagaaacctattttcagaaagaagagcttcatttccaaaagatcatatggatgttttcaacctaatccatataaaactgcaaacaaagtaaatcactgtatttctacaaatagaagaagaaattttctgctttccccttatgaaatggcctctgaggttctaccattgagtctttgacttctggttttgagaataagatttacagaaacaatatgataatgaggatacacaatagacaacactcttcaatccttatgagtgttgacttacaaactaatccttggtggaagtctatttttctcttagagaaacaccacaacaattttttgagtgataggggagaaggagtcaagaggaacttgtcatattatctgaagctgactagtcatttgcattccgtctccaaatcaccatttgtccatttctccatacacatccatattataaggaagggaatagtgtaaaataatttgaaatgggtgaaaaagcattgctttgctttcttgctttcttttcaccaaaaataattttagattttgtattaaaataattttgcacagtgaaatgtctttagttttttttcaagtctcatttaatatatattcagctggcatagagcctatgacactaccctaaggactggtaactctttttggcacgttggacggggctgtaatttgactgccttacagtcatgatcattttaagattaatgccactggattctaatattaaaactctagtttggctagacatttgccatatatctgactattctaggaatgacttcattaaagagtgaaaatgtaaccactacttcattagaacattaaaaaatgtaatcttagactagtctgagattttcctgttagtcttatttgcccaaagattcttgataaaatagtattttatgaattttcaaattctatataatttttatacgtagaagggacaatattctagaaaagcattttttgaaggcctattctgtggaaacactagctacattagatgctctatggaagactaggatactggggagcaatacatttaaaagatgctacaaaccatgcccatcacttggatattcataatgaatataaatttttgcatcctagagaaatgtttaaagtttgaatgaatgtagtactgaaccacagagctctatgatcataaaatatttattcacatattttggaggtggtgttttgcagaacacaccttggaaaacacatttctctaatttaggcaaagcattgaaattaatcccaatacaatatttttaaaccttgttattcctaccttggctcaaatagagtctaactacatttctattgctaaatagctgtctaaaacatttacattttaaaaatatgagaaagccaatggaaagtctcaaaataattttagaaccataatttttaagagcttcataagggggaatagatgcatactgtttcctcccttcttaaacgatgacaataaaacattacccagcaaattccgcaaattgatagagagaatgatggtggatagaagagaatgaaaatgtccttcacaactgggtgtggttgctcacgcccgtaatcccagaaatttgggaggctgaggcgggctgatgacctgaggtcaggagttcgagaccagcctggccaacatggtgaaaccctgtctctactaaaactacaaaaattagtcaggtgtggtggctggagcctgtaatcccagctccttgggaggccgaggcaggagaatcgtttgaacccgggagacggaggttgcagtgaggcaagataatgccattgccctccagcctgggtgagagagcaagattccatctcaaaaaataaaaaataaaaaataataataagaaagaaagaaaagaaaaaaaaactgtcattctcagccttagctgaactgaaacttctcttttgtgtgtttttggaccgctacacaaagggccttaggcagctctgcaggttttcaggctgaagtggagagagaggagaggatgacagtgatacggagagtagcttccaggtttcactttaggtaagtctcagcctcaaatccagccaagtcgcctccatgacttctggactaacacagcctcctgtttctttgttgtgtgtccccctgccatcattttaacatgtcttcatccatcatctgcccatacaagcttcactgcaggagtttttgctcaggactctctgaaaaacaagtccagtttttaaccctgcctctctcttttgcctaaatccattgctaaactatgtagatactctttatagctaattgtgttaaatccagattccttaacctcacttttatgtcttgatactaattagtttttctcttgccccacctaatcaacctaattcctcattattttcccaaacaggccacttcaagctgttctgttcacctcatgcatatagactgctcatttctgaccccagcgtttgcatttgttattctttctacctcaaatgttctgatttctactcaccactaagttgtgcgtcttgatctattcagagctttcttctttattccagcagccattttgtagtggagccctgcccagcgtctatctcctttcttctgatcacagcagttcagttttccttggagggtgcttccctttcacatcctttgtccattgcatttgggggagtgatcagtccctagttctaggcagggtcatgggaagaagtcttggccagtcagagtcacagtaatttgttcaagggaatatactatgcttctgatccaatgacactggtctctagacttatgctggaattacagggaaagtcaagttacccaccatcttcactcccaccttcaaatagggtttgccaagttcctagaatctgaggctacatgtattagtccattttcatgctgctgataaagacatccccaagtctgggtaatttataaagaaaaagaggtttagtggactcacaatttcacgtggctatgggggcctcaaaatcatggcagaaggcaaaaggcacgtcttacatagtggtaggtaagagaagaaacgagaaccaagcgaaaggagtttctaaagctatcagatcctgtgagacttattcactaccatgagaacagcatggggtaaaccacccccaatcattcaattatctcccatttttatatcagcagctcactcaaataatgcgtaatttaggcttggacaacaatcttacgatgtagacatcatcatatatagagactgaatgtttcaaagccaacatctattttcatccctgtgcctagcttttctgttttttttttaatcggtacattcttatatcttgattttaaaatccattgtccagtttttctgtgtacgcttatatttatccataacatgaaccaacccagatgtggaaagaataaaaaatgcattgtctcctttacaccaccctgcgtggaaatgtgcttgcttctgcaccatctaatgcattttgttgtccaaatacacacaccagagactgataacactgttagccctgagactaaccaggtcagagcacatcaggaacattgcagatagaaaacctaccatgccaatgattgtggtcatttttagcccagtggagggagctggtttgacatcagagacacagctaatgtcagcaggatacagcacataaaatcacatttctcctccttcgtaccttatgcaaaccaaggaaactggttttatttccaatttggcaacaaaaaagaacaaggtgctaatctttcaaataaagatggaaatatttttcctagtgactgacttttcagcactatttctaagtgaactgtccttggggaagcaacccaggatataattttactgtcacataaaacattgcattatattttagtcaaatacattttatgctttgacagtttctctctctttttctctccctcttgctgtcactctctctcttctctctttctcaggaatttagatagaagggttttcttatagtgaaacttttaatctcaatgcatgatgcctgtgcttgctctaactgatgagtagatgcaatttaacagatacggtactccaagggcgtttggcattcctacctccttcaggcaaagaaagctgcagtctgttgtgagtgaaaaaaataaaagaatagagacaagtataataatgaagaaaagactttccttttttcatcctccaggagataaagaaaaccaccttattatgataaacactagcctacataaaatagaggtggaaggggtagaaaaaagtagagaaaatgactgccttctttgaagtcattttataataccaaaaaatgatttgtctgtgttattcttaagtgaaatggggaggggaaaggaactttgatgcaatatatataaaataacattttcttaatttttgaagcttttaggtaatttttttctatcggggagaacttgatctgagataaaagacccaaattgctttcctttcaggctcacctttaatttatgtcaacttttattggaactgagctatcagaaatgatgaaatttgcattccttctcatcatccccatatctaagtatataataattatgatattatgttgccctacaaatctgggttcctagaagtgattactggattactgtcatctgaaaaatgtaattctaagtacggagacttatttttagagacagaaaatcacttctctatgaaactataatatgggtagaggtggtgtggatggggaaatgatattaaatgcattatggataggctggatggtaataaaactctagaggcttgttatttggaaaaacagtaagaagtccagcatagatcaaaagctgggtaataccaaactcattaatggaaaaaagtcacagggatcataacgtaatgtaagctgatacaaggaagtcactcaaagactcagtcctggtttcccattgtctctgttaggaaaaaatcaaaatgagcttctctctctctctcttttttaccacatctgacatctggactaaactcaagggtctttccattgttaacaaatgcggcatgcacaatttatcccctgtttgcctctttgaggagtctaacaactatgggctagggagaaggtcttaaccccatttggaattaggtattaggaatggcccctgttatccacaaaggctgctccctgactccaccaagggcagatgatcctcttctggtttcttttcctaagaagaatttggaggagacattgttttctaaattgtaaagctttgtgatgcacagcctaacaaaattagctgagattattggaagaaatgatccaaagtaattacttagaaattgatctgctgtgatttttttctcttttcttctacaccctgtcgtcagaaaggacagaaaatgctttctaagaaaagtatcttagggataactgttaacagattttttaatgcccattttgtcaacttccagtgacaaatattaatacattttactcaagtgaagatattataatttacctggcaatgacaatattatgacaataatgacaatgagaaggtttgggatatttactatgatctaggtgtcgggctttataaatttcacctcctataattttcctaacaattctacgtggtaggcctaatttttctctgaaataagaaacatgcagtcttgagaggttaagtaactaacccaaagtccacagttggtagatgggaggcatgattcaagctcagattatctgaggatgaatccatacaatgatttcctatgtttcactgcttcacaatttgattttcattacaatgtataaaaatatctatggatgtcagacatcttaaggaaatgaagacttcctgtatttgtaaaggacaatatattttaaactccaatatctagagttacttatgaaatgatatttcaggaaggggatacaggttatattcattatatcttaaagaatcatcattctaattcctggcatagcactcagacagtattgtagtataatgggcatggaagatgggtcagtactcaatgagatgctgttttaattgtagggacaagggagtccttatgattctcagatggcactttgcatcagaaacagccaggttgcaaaggtgttaaattagggaccaggttgacttggagagtttgcctggacactggggttgggcgggtacatattgttcagcttcaattggacatcactctacttgatccccatcaagatgaagatgagcaagaaagacccaatgcatgtaaaacagtcactcttcaacttgagcattcatcagtcacctgaagggctggtttacatactgtggctgcgtcccatcctcagcatttctgattctgtagatgtggggctgactccctagaatttgcattttaaaaaatcccccacttatgctaatgctgttggtgccttgagaaccactgccataggagatgctgtaaatactctgcctgtaaccctttggatttcttaaccgtatttttacacaagagttctcggtgtgcttctactctcatcatgaagaacctgctctgcctgaatacaggatgagctgtaatctcatcattctaactatcaaccaatggctgatggtatagagatcaatctgccttatccccattaaagggactcagatgtgacttgcaagactaagctaaagctactttccgtgggactttacttgatattgcccatttgccagctccttctattcccagttcagcttcctcactaccagtttttccaggggcacatttaatagatcacctccccacaaatctttagagaacccgatttaagcatgtcaattgtgtctgcacattcttctgaatggtgaaataatcctgggtactaaagggagaagcatagcaagaattacttctcctcccttgctcagtctaaagggtgaatttcagggatattggggggcattcatggggtgcccagggcacctgaaagtcagtgtagataggcagcatctgtcctgacttcctgtcgctcagctctgcattttccacacctgtggatcacatttgccaatctgcaaataattccattttttcatgtcagaatgtaaattccttgagtttagggattcttttccactgtttgttagctgttacattataagaccttagaaagatccagtgcacagaagacactcaaatatctgttgaataagtgcattctgggatatcaaataataaaaaatggttgcaaaagaaaagcgatattttgcggtgagtgctcgaatgctggaaagttctatcactgggaatttctatcaggtgcatgcgtgggctcttcagctcatttctaatctacttgggtactgaagttggcatcagaaatgaagtgtaaaacccaacatgtaaccaaacaaagcttacagctctttttttctcctttcttcctttgtcaataaaacactcttgcacatgcatcacaaaaataggtttcagtttcttaaacacttcgcaatatttgatactttaaaatctattcaatcaataggtatttgaatgcctgttatgtgctgagaactactaagatctgggaatatagtagttgacagaacagttaaaaagaatctgtgacctcaaaaagtttactttagtgatttaattaaaaaacaaaaattatatatatttatggtgtgaaacatgatgttttaaaatacatatacattgtggaatgaccaatcaagctaattaaatattaactcacataattaccattttttagtatgaacatttaaaatatactaggagtttacattctgttgcaaaaatgaaaccatttaaagattggcaaatgtgacctacatatttgcaaagaaaaggacaaatctccttttaaagctttatgtaaaaaatgaaaatctattaaaatggtttattctgatttgaaaataagggtaattaaagaaatgaaaatgcatttatttccttcaacgtgccttccagaccttggcacttgcccactcctctcctgaaaataatttccccctgaaagttctctgattctgctttttcccttcattctaatcacatcctcaaaaagcctgtccctattcaccggttctacattaggttattttcctccaccccaatatctacactcacacacactacctctctttcccactaacctgtgctttcttcctaagggtgctattgctatctgaagttactacactctttatttgcttactgctttatcctgtgtctctcactgatatgcaaacccatgtagcaagtgtctttgtcttaaattgctaggacttcaatgcctggtgcccactgggcactcaataaatcatgattgactaatgctatataatggacttaagcagctgaaaaaataatgtatattaacttttctgaagtcaatgttattgcacacaattattgtataaaactgttgtttttcagtctgaatcactcttctgtatacatggacagggccatctgttaatttgcagttgtaattgtttctgcagatgggtgttaaattatagacatgaccgtgaagacatggcagaacttgttaccatcctttgccaatggcctttttttgtgtgttcattttagggactgaaccaattattcagttcagacgctcccatataaatcaaatgctttgtccacaatggctgtttcaaagcaattttctcatttcatggaggttctgttttaggatgtgggttgttgttgagctttaaggaaacctggatttttcctgtgctgtcaggcccaggtatattgaagccaagcactagagattacaaaagagggtctctggaaagggaatttatgtgcttactatacagcatggctgtgttctagccacacggatgcaatttcagaaaattcatttgacttttctttttttttttttttcacagaatggtttctcaagcacatcacagattttgatcaaattgtttttcactgccaatcagatgggtggtaggaatcagttttaagtgattcgtccactttttggcactttgtatgttgccaataaaaatcatttcacttagaacggaatttgccatctgtgataaatgtctaccaattagtttctcatcacttttgagaaaagggagggcatcacaatattttccatctagtgaggaatttaaaatacactttatattttgaaaatgcacactgcttaatagaattttgggttggtgggcagtgtagtggacatctgttgattctttcctgctcagattttatttcccattctaggacatcccttcattttttctttggtgacccaccttccccaagtcccagtccatgtgactcagactcagatgtgaccatctttatcattctctctttactttcagggtgggtatgtaatcaaggcgggctcatcagcaatgttctcctcccaggcctacatgatttggttcaggtacaggcaaggtggtccagggagcctagacctcctggtgcttgctgaagccaccaggaagaaggctgctcattctactagactagaagctgtgacaagatcactctggagcattagcttctgtaagatgggaagagtttgagtgaaagcaatgacaacagtatcaaaaggggaattgaaagatggagggagagaaataaagaagaggatctgagctaggcatctgataagaatgttacagtcctagacctacctatgttgaagggtaggcctaccctcctagcctttttcagctatttcaattattttatcttttgcttaagggagtctgacttatgcttctacaaacttgctgactgctatagttgggaatactaaaaccaaagatagctgtctaatcctttagaagtttggcatgatttagtcttggaatccacattcccaaaacatccataagtttttagtttaattacaaattttatggcaacagtttataaatgcaacttcttgtagctaagtatgcccattatttctaaagccacatttgccagcagctttgtcacatttcttgttcaaagatggggtgaaactagtattagggaagctcataccaaaagaagtttgtattttcaccttatttccaatttatttcaggcctaactcagaaggagagaggaagcggatcactatataatctattcaatttcaatttcaaaagatgctgctgctgatcaaaggatacttgtgagtagcacatttccataaaatgaattttgacaactttcccccaaatgtgtgtcttactttagcttttgatttgaaaggagaaatggaggttggcaggaaagataaatgaaagtgatactgacagtgtttggggctgccaaataatctgcatcttagaatttctgtagttctaaggcaggccttaatctagtattttaaatctagtgcatgccccctgcttcccaactcatggttttcctagacaagtctttatagttttccagggtgatagacctcttaaaggaacatcccctcttcccaatctccagttcaatctcagacaggtcaagcctgctgatctcattgtctgtcaatcctttatatatgtactaaatttttttttaatgcccttagatgctattacctagtattctacatggctataggcttcaggccaacaatcttgagaagacctggtttcagcagtccactggttcaatatattggcataagcaccatgatttgcgttcctttttgtaaaataactctccaaattgtagcatatcaatatctgagggttttttttttgtttttgtttgagactaggtctcactctttcacccaggctggaaagcagtggcacgatcttggcttactgcagcctcagactcccaaataaccagggccacggctgtacgccaccatgcccagctaatttttgtatattttttagagatggagtttggccgtgttatccaggctggtcttgaactcctgttggcattacaggtgtgagccactgcgctccgccaaattatctgagtattttcaaaatggatctcaattgtttccttgatatcacctgaataacattcttggtaagttgcttattattttccactttctcagaagtttgtagcaaacttgtctcaatattgtgagaagtctgactgatttgggatctggctcatatagacatttcacttgcaaagtaggacagtgctacaatcatcaattaaaataaataaatgcacagtgaatcaaatatagttttaatatttgaatagtttacttctggcccggtattgagcaaacagtacattatttaaggtaaatgtaactcaataaacacaaagttttagttacataacatagaatctatcctgcagaagttcagatcaatttattaactttaaacatgcttctctttgacatctcctttccaaaattcagaacttctgttctctgaggctaaattctgctgtgtagaattgatgaaaatgactgacccaaagctttaattcctccagaggtgtaagaatcctaataaaaaactagagaacccaaatgaatataaaatattcaattattcatttgattattgggtgttttggtcttaaaagccagacttgcaccagaaggaatttaaagcagagcgtccagtagaaggaatggacactttctagaatgcattgcctgcctcaaccctttccttcactcatccaccccatatatattagctatctattactgtctaagaaattagttgtatctgaattgtagtggcttaactcaatacacagctattatctcagtctctcgggtcagggaatgaggcagaacttagctgggcgtttgtttcaggacatctcatatggtagtgatcaggtgttggctggggctgcagatttcttaaggcttggcttgaggagaaactgcttccaagctcacttacctgaaaaataagaaaattcatttgcagactgactcatgtggctcttggcccatctcaggttctcttttactgctacctggcatcatctgttcccagctatgtgagcccctccacaggcctactcacagcatagaatcatgctcccccgcagaacaagggtttggagagagagagcatgagaggggaaaacaagaccaaagtcatagtctattttgtaagctaatccctccagtgacattccacaacatttgccatattcagttcattagaagtaagttactaggtccaaatcacattcaaaacgaggaaattgaacaagggtatgagtacttggagatgaggaatcactgggggccatgtcagaggctgtccacgacactagtctacctcagactagaaagtgaagattgtggccgggcaccgtgactcacgcctgtaatcccagcactttgggatgccgaggcaggtggatcacctgaggtcaggaatttgagaccagcctggccaacatggtgaaacccaaactctactaaaaaaaaatacaaaaattagccaggtgtggtggcagctgcctgtaattctagctactcgggaggctgaggcacgagaatcccttgaacccaggaggcagaggttgcagtgagccaagatcgcaccactgcactccagcctgggtgacagagtgagactttgtctcaaaaaaaaaaaagaaaaagaaagtgaaggttgtactttggatcagatagaactgactttcacttccgtattgaatattccttagttatgtgatacagtcaagtttcttaacatttctcaaccttgttttgttcatgtattaaaagtgaatacaatagttcctttctcccaggcttgtggtattccatgcaataacatcatcacatcagaagtcccttgtacaatgctgggaacatagtaggtgctcagttaaaaagaatatatatacatacacacacatataaattatatatacacatatataaattatatacacatatattaaattatatatctatataaattatatatacctatataaattatataaattatatatacctatgtaaattatataaattatatatatacatatattttttttctgcttccctcttctctttaaacttatatagcacttataaaccttccaacctcgtaagatgtgcatcccattggtaaaagcattgatgcttcagttacactgtctgattttgaatctagtctctaccatctcgcagctgcatgaacaaggatgaattcatgtctctaagcttcagtttccctatgcattaaatgtggaaagcaagggtcatagaatgtatatgaagaacaaataaaataaagtgtacgatggatttagcttatgcctaccagatcaatatgtggcaacttatatttatattagaattatttatttctattaaattatatattataataatatatatttatattctatataaatatattcatataagaattattgaatatttacattaacatttttatgcagcaaaaattattaaatcagccattattgtaggtatagattttggcaacttattattaaaaacctgatttgaggaactcttgacacccagggttttttccactcttctctgtccttccctcaagggtcagctcaggaagagctctttttgtagcagaaggctctttaagaaagcaatcatttgactgattttgggggaaaatgtggcccacgaaagcagactgggaccacaaattaagcatattcgataaggaaagaggcagaaggaagcagagagaaatagtgatatttcctggagaaataccaagagaacagaggaaggaaataatgtgaacagagtgggttattcaggaccacgcagcactagagacatttgtgcctggctagagagaagcccatggaaaagctatccattattctacatcactaactcccagttttgtttgaattttatatctacacagggggtaaaaaacaaacaaaaaactcccatcccctcaaacacaaaacacttctgcaaggggatcgccattctattcatatcatctgaagcaaagaatgtgaaatggtgatttgaaaaaaaattgtaaattatgttcctggtttattgtttattcttttcctttccattttctgaaccctcaaccttttgccccaccgcatctaaactaccacctgtgaaaacatgctcgtcttagagaacatattgataaattcacattcatctttgaaaacaattttcccacttgtagtcccctgtcaggcttgtctgagatcaaaacaagaccttgtggtgctctgaaaatgaacttggttaagctgcacagtttcaaccccacctcctataatgatcacctagaagcaagtgtggcagtgtatggtctacgattttaagggagatgtttcctacactgagttgtgttcaccctggcttggtgacctggatgggatcatcgtttggttttccaaatgttttctatctccttatacatggcaggagctgagctattgaaaatagggctagggaggaaagagagagagactaaatggatttctgtaagtgacaaaagggaaccacccttaaatacaaagaaatgccagtttatgttggtgctcaagatagtgcatgagtgactcacacacatctgttgtacatcatgcagctctgggcacaaggagaggcacaagcatgtgcacagttttttattttatttttatttttattttattttattttgcgctgctgcttagtgtgcttgtttctgtaagtctcttctcctgtgtggagcttctgaattcaatcaagcagggtaatttccgatctaacaccaccatccttgcctgtgtgtatggggtggttttgaactttcagcaattcacataaaataaaaatggaggcagcagagcggagttggttcatgcagcctttggggtcagacttcgcatttcagtggctcctccattcccagttgctctatgcctttgtcatctcatctgtgatatggaaatgctggtccaagggttgtgaggattagagttttaattaaacacagagtagagtgcctatttcacaaaaaagttgagtcaatgttactttctgttgttgcttagcatttaaaagataatttacattttgtgccataaataaacacttcaaaaaactctccccaaatatcaagagccattggcaaaatttagttttaatattagcttttttttttttttttagcatttatggtatttcctatacattctggtgcatattactagatataaactgatttatctcatagtgatttttagtatctctgattctaatttttataacattctttttttcttactcctacctttaccgtaatgcattgatgcttctttatattcatattccatttttttcttttcttttatattggaagttatatattctattttaactctaaaattgatatcataggccttcccaaatgattataggaatttgtagtatttaaactctgattgcatcctcaagtaaatatgcctttgttcagcatgttattttcatcatttaatgcaataaatcagacattgttattttatattgacaatgtttatttagctatacctgcctgtattaattttttcattaattcatcttgctcttccaatctttcttctggggaataacttaaagcacagtattttaaagtgaaagttctttgagttttaatttttttaaaaaattgagaataatagatatatattttcagagtacatgtgataatttaatatattcatataatgtgtaaagatcaaatcaaggtaattgggatatctgtcaccttaaatattttacttttctttatgctaaaaacattcaaattattcccttttcactcctttgaaatattcagtagattatcgtaaactatagtaaccctactgatctacggaacactaggtcttattcttttattttaacagtacatttgtacctacttgtctttgattatataaaaatgacttcacttctgttcttgattatattgcttaataataatagctatttcagttgggaattagttccactactaagatcttccctgtatctttagtcttctctggtctcctacaattgtgtccatgtgagtttctttttatgtatatttctctatcttttgttagtagtagaatatagtattatatctcaaagtagttttatataacttccctctattctgtccttttggtaccccaattagatgaatattagactcattccttctccacatcccttaatcctttttttcgtaacttccacctctggcctacattttgagtatttttttcagattttcttgttcactaatactttttttcatttatgcccagttttctgtgtaaataaccactcttttcctctaaattttaatgaatttctttaaattttttaaatccctaatttcttttgtagtctgcttagcaatgtttgcttctccttctgaatgttttttttcttttttctttgaaggatttttttctattgtcaatgtccttaaacttttttgtaaatacctacttttatgatttttaataaatctattatgtaaaattctttgtgcctagttccattatttattgcatgtattaacatttacttgtgtagttttttttatatttcatgatctttgactccaaactcatatggatttgatcttaaactgtgggaaactgcgcttacatccaggatgtattttttcagggagaatttgaatttattcttaataaaaaacagaaggctttacctagatgatactttaaaaacaacaacaatgaaaactcaaaccaaaacaaaacaaaaaaacaaacagtaattccaaaaaaccgcaaactcaatttttttccaggtcctcagcttaattgtggaatcttgcgtgtggttctatcactttgctgttggccaaatgctcagtatctcaattatgacatttatgtttggatttttcccattccacaatctgatttacatgttttatttgtgatgttttcagtttcagcttatggcttttgttctatgagaatatatagtctaccaggctgttgtcagagcctccgtaatcttcccattcaataattctctacatcgtttattattttgtgtttgccttcttcctctcaactttcaatctgaaaatgtaaatgcttgccattcatccatccttctttcatccaagctttcagtaaatatttactgagtatcctatatggcaggcactggatccagtacacaacacacagtggcaaataaaacagatgtgacctgttgtgcaagaagacaatcacaagccataagctaaaaaagtggtcctgcaggggatggggaaggattaattttcaatctcattatacaaagaattcctactataagtaataatttcagtcatttgtgcagaactgtatggtatggacacaaggttctatattgtaatgttgttttgaagacaggccattgatggtgagttagaatcagaaaatgtggctttacttttttagttatacatctttgtggctctgagatccttagtccataacttaatctctctggtcctgttttcatgtctaagcaatgaaaatagccatacctatcttagaaggtggatacaaagttaagtaatgtggttcgatgcgatggcatgcaaacgtcgatgacatatatttaccttttctctcagagttgttcccatgtttaagaaattgatttgacccacctctaccatctaaagcaaaccatagcaagaatatcatgtactttcactataatggtcactattgcttagacatcttatctgcttattttcagaacaatctgatccactagaaattgtaaattgatggggggttggaagaagcttaaaagatgagtcgttatataaacatgatcatttaaatctgatttctaccctttttatttcttatttccacccgaacagtaagaacaacaatgcaaaagaagtaattcgacatagaaaacaacataagactagggaaataagtaagcagaatagaaagaaaaaatataaataaagcccagggttttttgtttgttgtttgaattttcaacacctagttgggtgtttggcatatcatagttgcacaatacatgcttactgagtagagtggaagtaaagcaaatggaaaccaattctagggaatatcatgtatcttactttattttattattttagttattaatttttttattatactttaagttctagggtacatgtgcacaacgtgcaggtttgttacatatgtatacatgtgccataattttaaggagtcaatataatgtgcaattttgttttgagcctgggctttggacccagcatttacttaggtacaacactggctgtgtgaattcacacaagtgatttcgtttctctaaggtttgccttcaccctcagtaatgtagataaaacaacaatacctattcaatcagttgtgacgattaagggtgataatgcctatgccatgcttaccatcttggtcttctgtctttcttcttggtatactgctaccaccatcacagtcatcatcaccattgttactaatacgacattgcctggaattaataacttttctctctttgtatgtaggcagtcagatatttgacaatgagtggcagtcatttgtttttgatgttcaaatttttgcgaacaaagaaaaagagacctaggatgaattttctttaaggggaaagtgtaaagaattaaaacatgttagttatacatcctgaaatgtgggaagatagcagtgcctaacatcattactgtgggtggatccagaaatcatgcttgaaggaaaataatgacatgcttttagccaattatgaaactttgttttgctaaatgggacctgaagagatgtgataaagagatagatttttttttcccagaccatgttcagaagggaaagaagaaagataaagctgctaaagagaaaactttctggggaaaaacacagttttaaaaatgagaaattgaatactatttttttgccatatagtatgtattataattactttccctgctctccacaaaatctttagtaaaatattcatttctggcaccatatagattgtgtacaccttaatttcattaatttctttgtgtttcctataaaacttcaataacgagcgtaagaatatggcaacattttgaaattgcagcagttaaaatgatatttaaattgagaatataatgaacttgtaataggagggaaagaagaggggaagtggagcccttgagaattcagggaatccctgtgctcagaagaaattacactgtgatgccaaaatcctaataatgttccagtaaaactgctaaactcagattgaaattttagtgttaaaaggtaggtttgcattataacattctatccttccatcctcaaaatgaaaaagcatgttaagacataaagtaaaatttgattaaaataattatatcaaacttatctcttaacggatgctaggaaaggtgctatttcacatgtataacctcaccgtattttcaaaactattatttgccccatgttataaatgaggaaggaaactgagtctcagagaaggtaaatcattttctcaagtgcacagctgggattccagccaggcgagtctattctaaacccattaaatgtcatattttaatgttccttgatttctccattcaaaaacaagagaaaaggattaaggcaaatggaagagggggatacttaaatgccaacataaaagagtaggcacaaatatctgactttgtgaaatagtatgactttgtggaaatagatgtaatttgaaatgcagttaaaggaatccgtgaatgaaatgagaaaagagatggaaatgatgtcttccgcagtaacatcagttgtgcataacaatgtcatgggtaaatgcccatctgataaagaggttttaattaaactaaataatttattatccattatacttcaataaattaaaaaggatataatctaagatgctttatttctctgaaacaggattgtataccataaattcagcccatcatgtgttctcaagtgagaaaatgtccagattaataaaatgcagggaaggtaataattaatttccataatattttaatccttggcacatttatccaaatacatttttccatgcagagttagacattgctttttgttggatggggaatgaatgaaaataagtttttcatagggaaaattttgaattaaatatgaactggtatcataattcaatgatagctatgcactgtgtatttcctatatatgcatatgaacacacccttatgtatatacacatatgtaattttcatatattcatacacatatatattattcatgtttatgtaggtaaatgagtgtatatgcacatagactcaccaatgccacatgttcccttagttttatccatctcctttaagttcctaaatatttgtagtttttagatattaaataaaaagtacatatcaaaaaaacatacataaaatataaagtgttaattaaaataaaagatactaaaatttatcctaatttatatcttctctatccccctctattataaactgctgttaatttattgagattcattttagggaaaaattactgagaccattatgtagagctatatgtatttttatctgtctatattctgtttcttttaaatactcataagtgaggtcatatagcatacattattttgaactttgcttttttcagtttagactttcccgcatatacacccataaatatagtttgttgtttttaacaatgtcttactattttttccataaactgcagtttgtcttgttgatgaatattttatttcaaataatttccagatatttctattaaagcaatactgtaatgcacatccttatgagattgaccaatagtaattttgagcagtagaattgttgaatgacaagggcatttgaaattttaatcattatagcgacttatcacccagaaaaggtttactgatttatatcccacttacagtgtttccctgtactgttaacaaatactgaatgtggctgggcgtggcggctcacacctgtaattccagcactttgggaggacaaagcaggcagatcacttgaggccaggagttcgagaccagcctggccaatgtggtaaaaccccatctctactaaaaatacaaaaattatccaggcatggtggtgtgcgcctgtagtcccagctatgtgggaggctgaggcaggagaattgcttgaacctaggagatggaggctgcagtgagccaagattgtgccactgcactccagcctgagcgacagagtgagactctatctcaaaacaaaacaaaacaaaaaaaaacacaaatactgaatgcatcatcactgatttaagagacaattatttaatcaagttgagcagttgtgttacagaattttataagaatattcacaactgtttttctttaaaaagaaagcaacctttgagtacttgagatagataaaattttaagaaattatttttcatattatttttctgattatagggaccttgagcatataaacatggatacaaagtataatttattagtaccctgtatagaaaaataactaattaaagaaaaagataaaattttaaggtgtataaagttttttttctgataataaaaatgaacatagttcattattaaaatgtgaaaaatacaaaataaaaacacagcaaaggttaaaagcacccatagaagtatatattcttaaaagaatgaaaatatattattttcttgaataatcattggcttataattttgtgtatttctctctctcttttccttccttccttccttctccttccttccttccttccttccttccttccttccttccttccttccttccttctttccttccttgttatagatgcatggagtggctaggaaagctgttagaggtaggatatctagtaagagctgtggtgctcagccctggctgcacattggaactgtctggagaacgtttaatggcccgatgcccaggttcaccccagatcaattacatgtatagttttgcatgtgtgtgtgtatatgtatacacacacacacacacacacacacacattatattcatttccttctgcacaaattaaaggttacataaaacactaagacctgatttttgtcttgtatcatttttttttcttttaacttttattttaagttcagggataaaagtgcaggtttgttacacaggtaaacttgtgtcatgggagtttgttttacagattatttcatcacccaggtattaggcctagtacctattagttatttttcctgatcctctccctcctccgactctccaccctctaaaagtccccagcatgtattgttaccctctttgtatccatgtgttctcatcatttagctcccacttatatgtgagaacatgtggtatttggttttctgttcctgcgttagtttgctaaggatgttggcctccagctccatccatggcccagcaaaggacatgatcttgttcttttttatggctgcatagtattacatggtatatatgtatcacattttctttatccagtctatcattgatgggcatttaggttgattccacgtctttgcatcacttgtaagtgttctttattttcttttcctctggtagatatacacactgaaatctttccagtgtgtcttagaatgttcaattcaattcaagtgaaatgtagtaaaacaagattacttctgagaagttctctgtggacatgtgccccttctttctgagcctttctttaggaacacactcttctccatttgcctgaatatccatttggagtactagggcacctcctcaaaggagaaaggctctgctcaaatcagaatccagaaggcgtgactattggtgtcagttaatatggagtttactcccacagaaacatgtaacatcatattccaaaatctagtacctgcttttcagctcctattccctcttcttcccttgaatgatagtaaatatgtcataaagaaggtcttaaacttttaatgtttatttctcacacttctacacaatttgaagtttttctttttcatttcacgatggcatgcacttcactgtgatgaagtcagtttaacctctgttcaaaaatcttttgtttaacttccttcaaaacgttcagctcgggagaggcagtctccctcagaaaaatctcaagactattttccagataacctactggtttgatctgttacatttattgtagatattctcttccccactgagagagaactgaagcaagagtagctattccatatttctttatgaaaagtaaatttgtagtttgtgagctgggataatgcatccatagggataggggacccacagatgagtggtaaaatttgtcacttgtaaacagggaacattgtttctgaagagtaaatgagagctcccaccctgagagatgttaccattaagagaagggaactttggtattggaaaatctgggtcacataattttcatgtttatgtgtaccaccattttgttctaactcacagaaataatgaaagaggtgactgaagaggaactgtgtctgccttgttttcttcataccttgttgctcacagtcctagagcttacttcaaagactgatgatataaacacctaggggatctagattccaaattaagaaaaacagattgtgctatcaaagtgcagttgatttagaatctttgaaaaaagtaactttagtcttagagaatatgatctacagcaaagataccagaatgcaacttagaattgttttgctttacttttcgtccttaattttaaaaaaatatgtaatatatgaatacacttttatattaaagtctcaaatatctccgcatatgaacacagacaaatgtgatttaacatccatgtctctgaagctctctatccacccctctccctgtcccatccagaagtaaccactgttaatgtttctgaagtacctgtctctgttcttttatgcatatacatggagggggaagatagacataccaacacacacacacacacacacacacacacacacacaaattgtaaatgggattatattataaatatttttctgcaagctattttgtcttacaaatctgttcaagtgagtacatataagctaatcttatccacctgaaaatctttgtagaattctagagtacagacatactgtagtttgtttaaccacttttctgtaaatggacatctatattgtctctagcattttactgttttaaatgatgttgtagtaatgactttgaaaccttgaaacaattcacttaatatctctatatctcagcttccttatctataaaatggagaaatgatagcacctacctcaaagtataacatgcataataaaatttgatagtgttcatatggtcattttaaaaatttctattatgttgttgatggggatccttctttgtacacttgtgctatatgtcttagaagagatttttaaaagcagtctttttatgaaaagaacttgcaaaaaattgtgttagagactgctccattgccttctaaaaagtctctactgtttatagtgattcatttagatcaggatgagtttccttatatctttgtcagtgctgaacattttcaatcatttagtttttgccaacataatggcaaaagcatctcagttgttgccttagtttatattcttttaatgatgcatgaaggttcctcttcttttccttttctttttgtttacttggcattttcagtttcttcagtgaataaatattaaatcggtatcaggtagtaactgcttggaaatagaccctctataaacgtgaaaagatggaggtagaatgcttgcttgagggcaccagtgtcctaggtctgtctgttctccatcagatgaggttgtgggcttgtttaatttactctaagaaccaggaaacctaaagttagtagaaatcaatttctggactctctagttaatccatttgatctttttttgtctaccctttcaatattatactgcttgatttcatatttctttgtaagacatgaagctatctaatagtatgagtctttctatactatttttcaaattatgtttattctttagattttggactttgtaatctgcttaaacggttcaaaaataacattgtgatatttattgatatgactttgaatttatattttggtgagatcattgactgataaagtggtaagcctttctccatctggagacatgatttttgttctctttatttaggtctattctagtaagtttccatcattttcttctcattgaagaaaatagatacataaagtctaggaagcatattacaagctttagctaataacctcaatgtgagttccaacatctgggaagatctaagcattccaggtcccaataagtgtcctcttctgtccactaaatgtaaccattatggtgactttgatgccgtggaatgctgataaatgtttagctaccctttctctggaaaagacaacaactcagatttgtagtgtttgctgatttatgtgatgtgaatatgccgaccatggctgatttcaagctaccaggctggagctgagatgccccaatcagctctcctgatgcagcacacccagctcttttagattcctacatttatggtaattgcctcctttctttccttcatgcctttactgcctacatatgcctccttgaaaacctaaagcgtcattgagttccttttttttttaacgtagttggaaaatattgagcatttttcgctgaatattatgtgtatgaatttcatcactgttgtttagagtaactgttgtgtgttctataggaatggatgtatagggtaccagtgtgtaattataccacaattgtcttggatatttgcatcgtttccagtttgaggttcttaaaaacactaatgaatattctgttggatccatacttctgattggaatttttgggtagtagcatatatgtttcttcaattttaatgtattatgcaaaattttctagaatagtttaccaaattacctcccctccccctgtttacggcatttggcttcactccatattgtcacttgttattgtcagtctaatattagcctttgtaaggatcatataatgatatttcattatgttttaaaatccatttttgtgattgctaattagcatatttttacattttatattgccatttagatttcttttgtgtttgacctgcctgttcctctcgcccatgtttctactaggttatctttttacttactggtttgttggaggttttttttttacataactctgatgtgagtcctttggcagtcatatgagtggccaatatcttcttctcaatggcttgaatgctgtatcttttcatgagtatacactcttaacttgatttttatggttggggctttttatgtttttttaaacaaatttattcccaaccaaagcaggaaaactcagagtggctgttggaaattactgttggagattggagaaagagcagccttcttatctagcggtgtaactgatgcagggcaggttcttggctttgctcgggaaagaattcgagagtgagctggtaagtggaggaaagcagcttaattgaggtggtggccatgttacagctctgtgactgcttctgaagagcaggtctggcccaaaggcagtgcactgagagcagcctatgggtggtttgtagtcatatttatacccacttttactgacatgctaattaaggggcagagtattcagaaatagctagaaaatgggctgtaacctctgggtgtcaccatggcaaggggtggtaacttctggatgttgctctggcattcgtaaactgtcatagtgccagtgggagtgtcctatggtgatgggcagcgagagcaacttgaggtgtgcttagcacctcttcctggctttggtctgtcttcaatctggtccagagatgagtcctgccttcctcctacctcattcccccctcagagaatagatattcctccctaaatttaaagggattgcataagggcagagattcaacttctgtaactacttcatgctgattttatgggtgtagaccctgcctagaattggaggagtaaaaatctctgtatgccttatctaaggggcccaaaagcaggattttgacattctctaggtcagaagaagacatgcatcagaagccttgtgctagcattgtatttacatggacctgttgtaatctggaagacacagattttactgacgggttaaacaagcaagagctcaaaattagtagtaacaagatacttaccaaaggtcctaggagaggtaaaaaacagatgagatttgggggagcaatttgatagtcaatcagatatagttgggtcagtgccctggttatatctatgtaagtaggtagtttgctcatagatcttttgaatgttagcctcaacctgcccagagttgttaatatacatgcagcaggttttattaataactccacagactccacttgattcagcaagtaaataattcaatgccagtctgttatcaagactacatttgccagagtctagtgactcttgaaattccctttaatgcctgacttgtgttggtggctaatgattcaagggtttgagtcaagttctgtagagttgacttgtggtaggcaaagccacctcaggggccaatagttctattgccaccctgattcccaccagaattaattttactgctcatgtatttctggtactcctgggtcttatggggttatagacagtgacccctggaaggataagaatagccagtgaacatctgctcctgttccaagtttttgatatacaagggaaagctactcctaaaagaataggtgctttctgaaaatcgggggcagttatggggtgtatcttctttccactcatggccacaaacaaaaatgtgcccaggtagggtgcaaatggaggccctatgggatgtgatgtctgtcttttgctgccaagtttggtctatagagatattcatctcatgtttcaatggggatggtcgaacacaccttgtttccagaatggggtggtactctcaccttcccagattgggcagtgtttttccccccgtatgtcctgatcttggagaaggcaccatatatggtttcctcactcacaggtggaatcccatttacctcactgtggccttaggaacttggtatgtagggttggatcagagcatcataggaaagcttctgttttgtgtaattaacacaacagtttacgcaaaagatagaatcattagtgtaaaggagatatagatacacagcttcccaggtctgggtaatagtggcagtggtgggagtggtcatgtggaatccattaggtggggcagagttccacctaacaagtatggggtctggagattaagggatgattatggttagttaggaggtctggagagggctgtgagattttctggatgggtcagaaggtagaactctatcctggggatattgacgacaaagccagcaaccatgaagatcattcgctgatgccatcattttttagtagagacagggtttcaccatgttggccaggattgtctccacctcatgatccgcccaccttggcctcccaaagtgctgggattacaggcatatttactatagagttttgttcccacccacactggattaggttaattgggagagcaaagaggattaacaatgtcagtgtgatgtctggttgggctttagagtggcctctgcatctaacaaggacaaaagaggtgtttcccaggaggaggcagttggccaaagtgatagataagaagtattacattcagggagaagagaaaaattaatgctcctctcccacctacagcatcctgttaccacttccagctaaatgttgattcttttagataggcagtggaggtccctagatcatggtatcaacctccttttgtgcttgtgacttgtaagaaacaggtttaatcagagataaatgcacctaaccagttaatctctgaagttgaatagaagtgggggtacttaacaacacctcatagaggctgtattagtctgttctcacattgttataaagaaataacagagactgagtaatttataagtaaaagaggtttaattggctcacggttctgcaggctgtacagaaagcatggcaacacctgcttctagggaggcctgagggagttttttgcctcatggcagaaggcaaagcgaaagtaggcatcttacatggcaggagcaggactgaggggggggggaggtggcacacacttttaaacaaccagatctcatgataactcactcacaatcacaacaggaccaaggagatggtggtaatccattcatgagaaatccactcccataatccaatcacctcccaccaggccccacctccaatactggggattacaatttgacatgaaatttgggtgggggcacagatccaaaacatttcagaagccctttcattttgttgtaattgatcctcggggatctttctttcctggttgaatgggggaattaattctttctcttacgggagaaggcagtgctacattttcatattctcaaagggcattttgaacctggcctaaattgataatatgagtgagcattctatgtgtctcttcatcaaacagaaggtctaaagttaaaaaagggtcttccacaagtcatttcaaatgaactaagctttaaggttcctcttcgatctatccttacatataaaagagatatgggtaggagtgaaacccaggcccctgaggtctcctgacagagttttgctaatgtccttttaaaaacatgattagctttttctaccttacctgacgattgaggtctccagcaggagtgaagatgataggtaatacctaaggtggaagaaacttgctgggtcaacttagctgtgaagtaccatctgttatcactttgcaaaattttggtaatccaaacattggaatgatctctttaaggaagaatttagacacttcaacaccttttctgttctttgtggaaaagcttctatcaacctggtgaaagggtctataaacaccagctaatattttagttctatgtaaggtggtatctgagtgaaatctatttgccagtcttccccagggtttattcttcagtgttgcacagatttaagtgggggtgagggtatggggtggcatccagggtcattacaatcacagaattcacaggccttagtgatactttttttagtctggagtagtcccttccccaggaatatttgggaaatcaatttcaatagggagtctcatcccaaaagtgaggagtcatggaaatgcttaataattttccattgctcatgttcagaaaaagacagtttgttgctttctagggaccatcctgaggagtgcttttgtaaacctttctgttcttcccatttaattttcttgggagtatattatggtgccactgacatgggtggaatacctggtattagtgaaacggcctgtaatactggtgtttctttagctgtggccttggctgctctgtctgccagagaatttcctctgataatagaggtgtctcccttttgctgtcccctgcagtgaataacttctatctcctttaggagctggacagcacctaaatgttccaagatctctgagtgatgttgtatgagggatcctttagctgctaataatcccccctttttttcatatggcggcatgagaatggaacaccaggaggccgtatttggaatcagtaaatatattcacccttaagtctcttcccaaccagagtaccctaattagagcaattaattctgagagttaaattaagtctgagacctcaatgacttcttgttggataaccatagcgtaacctgcctctcttactccctcattaataaaaccacttccatctgtaaaccacccaacatcaggcttaggtagggactcatcttggaggtgaggctgctggagtagttttgttctacagtttccatacaggagtgaatgagttggagatctatttcctgggatgtgaagtccaacaacaggaacacagggtttaaaacttgacatgctttaagagtaacatctggggtgtcaagcagaagggcctgatatttaagtacccagcccccttttagtcattggtatccttttgcccccaggaccccctatacttggtggagagtcatgatgtctaattgttgtcccaagggaagcttactggcttcttttactaatggtggcagccacagcttgcaagcatctggccacccagctgccatctgttccagctgtttagaaaagtaattcactggtctagaattattctagagcctttgagttagaataaccaatgacatcccctgttcattatccacatagagagtaaagggtttttctaagtttgggagtctcaaagcagagaatattctcagcttttattctagagttaaaaatgcctattggcaggatttgtcccaattcaaaggcttgtgatcactccctttcagggctgcacagaatggaagccaaatctggcagaatctggacatttcccaaaaggcttttaactgtttcttagtctgagggtgctggagtgccaggatggcctctttttgctcctaggccaaggtgcttgtcccagaagtgagcacataccctaaattcttgaccctttggacataaatgtggggattgtcaggagttaactgatacactcattttcttagaaaattaaagatctagattatgttcctgtcagactcttccatagtagggctggaaatcaataggttatccacatattacaagagatatcaatttgttaactgtagttccctcaattctttttccaatgcattgccaaagagatggtgactgtccttccctaagctctaggaaggatatatagccaagctgagatgcaacattggtgtctggatcagtccattcaaaaggaaaaatatactggaagcctggatgaaaaggcatacaaaagaaagcatcctttatgtctttatgtttaatatcatgaaccaatgagcatcttcaggaacttgggtcaatttcatgtaaggattagaaactattgagtggactgggactactttctcattaactgccctcagatcctaaagaaatctatattccccatttggtttctttacaggcaaaatgggggtattatgtggggactgacaggattgattgtagtaatccttaccttaggaccattcttatcaagggctggatgccccctttaagcctcagttctcaaaggatattgtttattccatggatacttaacactcggtttcaaaataacctgaatcaggggtacattaacagctctaccagaaacttccatgtcctgaacaaatggatctacttgagaagcaataggtggtggaagagaggtcttttccttatcgtgttaaggcatgtatttagagctaggagaaatatcccttcctgatctgttgccttcttatgaggctttccaaattgaaatgtgacctgtaattgggaaagtaagtctcttcccagtaaagaaacaggacatttagatataagcaaaaacctatgggaaaatgtatggtccctctgtgtgaccaagggggttagtgaatcttctaatttttggctggtcatcagtcccccttatggtacataagtggaagataatggccctgagaaatgggttggaactgagtaggctgatcctgtatccaataagaactcagtattttttacctgccatatcaagggttacctgaggttcctctgttgagaaggtaaggtgtctagtgtaagccatagaagacctccagccctatgaatccactattctcttggcccttatgggtctgagtggctcaggctcccttttaatcctggggcatccattctacagtggccgtcttgcttctggaaagcacactgattttggcccaggggccagtgagtcagtggctcttgtgtgggcgccctagatgcagatcttacaatattttcttgggataggtaaacctgaggcagcaagagacttaaagcagtcattaacagttgtactattaggccaattattttcattttcacctcttcctgtgccctgttcctattgttataaatgctaaaggccatgtttaagagttggctcatggggatttggggtctcattgcttcgttttgtaacatcctcccattgtcaggggcaaactgagtaataaaatgcatacccaggaaagcctgtctttccaagaagtctgagtctgcattagtgtatatcttgagtgcctcaaccatgtagccctgaaacagagagaaattttcatctttccctgagttgcttctctaattttgtcataattaactggcttaaccacacactttttaatctcttctattaaaaaagtaaacatgttatttctgcattctagatgttgagaacccctctggtaatcccattgagggtctaggtctggaactgcatctcctcccccatgataagtggcacggccttggaaataagtggtcccttcatctgtatgctcattggcagtacctagaatcctttgcttttcctctttggtacagcaagttgataataacatatttgcgtgtcatgccaagttaaatcaaaagacatggtcaacttaacaaaccactctatgaacttccctgaatcctctgaaaactagctaaagtttcccttgtataaagtcaaataaatcatggaaaatagcacagatactctgattgttcccccatctccatcaactaccctctcacaatggacacaagtttgattttaggggctgatatggggccccgttcctggtcataccagttgggcttgcttccttgtgcattgcagggtataatagggcttgttggataagggggaggggtgcctgatgcactagagaaccgacagggtccccatcggaactggaaaactgaggaggctctaagcagggtgtcataggccttcttgggggagtacttcagagggtgtcatctagaatatctggtgcagcttcttggtgcctaggaagatcatgagacagacacattctgcaactgtcttttaggtcagaatcatggttgagtgccataaaaaccttcacataaggaacttctcgccatttttctttctttttacaaaacaagtccaattacaaaatagtattatagcataaagaaccctgtcaaggccaaatctgttggttctttgatttatattggacacaatcagtgttgcaataaaaaaggagtttttcctctttaaactgtctaatttaaatttactccagttacttaaaagatatcctagtggcgagtcctctgggatgctcactgtcatctccatgtctaataaggatctctataggagttgttcgtttgcctaagtccagcaaaagcctagttacttttctcttttaaattcccacatcctgcaaaacaggtgtaaatataagcagcaaagcattacaaaagtggattatgagctgtatgaatgggtagcagaatgatgagcctgaattccagaaaaagtgaagaaagtctcttagtttaggcagagaggggctaaaagaagcagaaggtgattgtggaagggaggaagggaataggtaagcagcatgctcaaagggagacctcagaggccctgactcacagataatctacccagtagaaaagacactaaaaaaaatgctcaggcggccacttgtctttgtgtgtagtcatccattagcccaggggtgcaggaactcccagtccccttgaccaagataaggttgaacaaggcagtttttggaatgaaaggaagatagcacactgggaggagcccacaactggctgctatggaaaatgactatttctaacttacagagcagaaagggcaagaccaagttccccaagggggaggggctataacccacaatcttagaggtaatgtcaatgccaaaaacctcaggatatctggatcagccagcagtaccaaggcggaaaaacctggagtacccaagtattggccaatgaggatttcctcaccaaatgcaaaaaactctggggcatctgtggggttgccaacaatgaaccccaaggccaagttggggtcacagaacagtgtgactctggtgtcccaggagcaacacaatggatgacttcttacaaccaaatgtcctgccttaaacaattgcccaaatatagctaacagggagtcaaagctaaaaaaaccacatacatttcagaacgcaaaataaaatggctgacgagcaataaaatggaattagtggggaaagaaccaagaaagagatgtactttgtggcacccaaaaaaggggtattttaaactggccacctagccagagggtatattccctggctcactggaataaacaggagggaggggcagaggggacactccttcatccacaggagccataatggcatcgaatgaggttttccatgtgggacccaggtgagagtcttctcggactcccctggcttgggtgggctcagctgctttggcggactgatgtggaggcctgcagccttttggtgagagcgcaaggatctcacatgaggcagcagtactatagccactcgcccatgtgctcggctccactgcctgccagaaaagatagtttccctgaaagagcttttggttaatgtgacagcctctgcagcattagcagctatttgaagttacagccctaatgtgacagctcttgtagctttgatcaccagttgcctcactgtctcttgccgtctctcttgccaccatcttctcttctctcctgactagctcaccaatgatgcagggcaagttcttgacttcactgaggaagaagttcaagagtgagtccggtggtggtagaaagcagctttattgaggtaatggcaatgtcacagctctgtgactgctcctgcagagcagggctggcccatattcagtgtaccaagagtagcagcctatgcgcggtttgctgtaacttttatacccacttttaatgacatgctaactaatgtgcaggttattcagaaatagctagaaaatgaacggtaacttccaggtgttaccatggcaaggggcagtgacttctaggtgttgtcatggcattagtaaactcctggcaccagggggagtgccttacggtgatggacagccagagcaacccgaggtattcttggcacctcttctcagttttgttgtgtcttcagtctggtctggagatgagttctgcctgtctcctaacgcgtagcatttggcaataatgtggaagacaaaagtaaaagtacctaatcaacttgtgaatcctgctaataagatttctagcagaatgttggaaaatggccagttagcttcttttagctacatatgataaaatacaggaaatacgagatgaagtaaaaaagggagttgtttagattttaatcagaattagaggaagcatacagagctctgggcagtctctccagatggcaaagcatcctccaatagactcagggtaaagatccaatcaagaatttagctctaatacccattcttaagagctcagaaagatttgaagtggtgcatagtcaaccctctcagttagacaaaatggttatagaaaacctcaaggaatttatcacttaaaatcatgatatttgtaaaacagagaaattatttcaaaaaaatgcctgttatttggggccttaaatgaaccccaacaagatttctccccccaaaaaaattcccaaagttattaagtagcttagaagattgagccaaaagtgttggcaattcaataataataatatatatatatttcaagacaagagtcttgctctgtcacccacgttggggtgcagtggcgctaccgtagctcactgcagcctcaacctcccaggctcaagcgatactctgacctcagcctccagagtagctgagactaaaggcacacaccatcatggccagataattaaaaaaataaaaattgcagagacagggttttgccattttgaacaagctggtcttgaatccctgggctcaagtgattctcccacctcagcctcccaaagtgctgggattacaggaataagccaccatgcccgatcattaataatatttggcaaccccacccaaggtacagaattgggccctaatcgtagaatatttcctgaccttagagcacgtaaaattagtagcatgtgcctagtggatttcaaatttgttaatgattaattactactacttatttttcattatttctcattttaaatgagaatatgtatttgtctactactttgtcttgctactttgtcttgtttcaccactatattggaggtgaaaaacaaagaaaacttttaacaggtctggaccagtcaggtacggtggctcacgcctataatcccagcactttgagaggccgaagcaggaagataacctgaggtcaggagttcaagactagcctggccaacacggtgaaaccttgtctctactaaatatacaaaaattagctaggggtggtggtgggctcctgtaatcccagctactcaggaggttgaggcaggagaattgcttgaacctgggaggcggaagttgcagtgagccaaaattgcaccactgccctccagcctgggcgactgaataagactctgtctcaaacaaaacaaacaagcaaacaaaaaaccccaacaacttctaacagctctctggatcaagaggagcagcacctaaggaaaattcattatatctgttcgtagatgacattctgaactttgaggctgagcctgattttttgatacagatgagactattggaagtcctgtgtatgagtgtatttttcatgtgggaggaatatgaatcattttgggccagagtgaccaatgcaatagactgtttaatggccataaattcttcctgtttcagttccatgcctatttccaatgttaccttgccaccattctcacatctagaagttgtctctctgtccattaccttaacttggaatttggtcgtgtagcatgattttgccaataagatattggtaaatttggcacagacacaaggttttgctcattagggcttgccctcatgcacaccagctataacaaagaatatgctgtttattggtgaagacatatgaggaagaggcccttgggcaaagagggaccccctggaggaagactaagaaactctagctgatagccaccattaaatggcagaccttagagtgataaccaaactctctgctgaatgtagcccacaagcagccccagaagatactttgtgaggtaaggtaatttcccagttttactcatccaactcagtatcttgagaagtatgcatttttattactgcttgtcactaattttgggtttgtgtgttgcacagcaatacatacagatatgcataccattctttgaacttaagaaggttcaatatcactaaatgataatcttcatttgcaaattgagttaaattcaaagcggtcttccaaagggatttttggcactcaagaaaattattctaaagtttatctgaaataatagtcctgggaatggccatatgtaagaaataataacttaaaagtatattgcataatgttgttctcaagttctttctaataatatttatgaagccatatttatatactaaaagtatagaatttaagcatattgaatgtgaaatacttttagatttcaaaaatgaattataaattacattaaacattaaattattcatttaagaaatgtattgaataacttataaatatttttcttttattataactttattaaggtatactcaaccaataaaaattgtagctatttaaggtgttcaacttgatgttttgatatatgtacacattatgaaataattaccacaatcaagctaattggcatatccatcaccttgcatagttactacatatggtgagaacacttaagactaacattgttagcaaatttcaagtacacaatacagtattattaactgtgatcaccatagtgtacattaggtttccagaactttgtcatcctgcatgaatgaacattgtaccctttgagcaatatccctccattttccctacactccagtccctggcaaccacgattcagttttctgcttcaatgagtttgcctttttaagaatccacatataagtgaaatcatgcagtatttgtctttctgtatctggcctgtttctcttatcataatgtcttctagtttcctctagattgttgcaaatagcaggatgccctttttaaaggccaaatagtattccattgtgcgcgcatgcatgcacgcacacacacacacacacacacacaaacacatacacactgcattttctttatccactcatcaaaaccacagtaaggtatcagtgtacccctgtcagataggggtacttttgtcttttagctgctatcaaaaagacaaaagataacaagttttggtgataatgtagagaaaagggaacccttgtatactattggtggaaatgtagattggtgcagccactgcggaaaatcgtataaaatagcagccactgttcaaaatagggtcctcacaaaaataaacatagggctagtatccagcaatcccacttctgagtgtatactcaaaaatgaaatcagtatctccaagagatatttgcatgcccatgtgcattgcagcctattcacaatatccaaggtatgaaaacaacctatgtgtcagttgtagtgctgtcttgaccctattctgagtcccttgctagaagctggttaattccacttctttagcagccgattaggtccacactccactaacatcccttatcaagctctcaggctcttagcccattatgcaccagcccttattaccctagggccagtgatagggtttggctgtgtccccacccaaatctcaacttgaattgtatctcccagaattcccacatgttgtgggagggacccagggagaggtaatttaatcatgggggcccgtctttcctgtgctattcttgtgataatgaataggtcttatgagatctgatgggcttatcaggggtttctgattttgcttcttcctcattttctcttgccactgccatgtaagaagtacctttcaactcccaccatgattctgagacctccccagccatgtggaactgtaaatccaattaaacctctttttcttcccagtcttgggtatgtctttatcagtagcatgaaaacagactaatacagtaaattggtactagtagagtgggatgttgctggaaagatacccaaaaatctggaagtgactttggaactgagtaacaggcagaggttggaacagtttggagggctcagaaggagataaaaaatgtggaaaagtttggaactgcctagagactgattgaatggctttgcccaaagtgctgatagcagtatgaacaataaggtccaggccgaggtgatctcagatggagattaggaacttgttgggaactggagcaaaggtgactcttgttatgttttagcaaagaggctggtggcatgttgcccctgccctagaaatttgtggaactttgaacttgagagagatgatttagggtatctgacggaagaaatttctaagcagcaaagcattcaagaggtaacttgggtgctgttaaaggcatttggttttataagggaagaagagcatacaaacttggaaaactgcagcctgactatgtgatatatattaaaaaaaacacacattttatggggagaaattcaagctggctgcagaaatttgcatacgtagcaaggagcctaatgttaatccccaagaacatggggaaaatgtctccaggccatgtcatagaccttcatggaagcttctcccatcacaggcccgaacgcccaggaggaaaaagtagtttccttggctgggcccagggtcttcattatatgtgcagcctagggacttggtgccctgtgtcccagccactccagccgtggctgaaaggggccaatgtacaaatcaggctgtgacttcagagggtggaagccccaagccttggcagcttccacatggtattgagcctgcagatgcacagaagtcaagaattgaggtttgagaacctccaactagatttcagaagatgtgtggagatgcctggatgcccaggcaaaagcttgctgcaggggtgaggccctaatagagaacctctgctagggcagtctggaagggaaatgtagggtcggagccctcactgagtccctactggggcactgcctagtggagctgtgagaagagggccaccgtcctccagaccccagaatggtagatccaccggcagcttgcaccatgtgcctaaaaaagccacagccgggagggaggctgtaccctgcaaagctacagggatggagctgcccaagaccatgggaacccgcctcttgcatcagcctgacctggatgtgagacctgaagtcaaggttttaaaatttgcctgccctgctggatttcagacttgcatgggcactgtaacctctttgttctagccaatttctcccatttggaatggctgtatttacccaatacctgtacccccattgtatctaggaagtaactagcttgattttgattttacaggctcataggtagaagggacttgccttgtctcagatgagactttggactgtggacttttgggttaatgctgaaatgagttaagactttcggggactgttgggaaggcatgattggttttgaaatgtgagggcatgaaatttggaggggccaggggcagaatgatatggtttggctgtgtccctacccaaatctcaacttgagttatgtctcccagaattcccatgtgttgtgggaaggactctgggagaggcagttgaatcatgggagccagtatttcccatgctattcttgtgatagtgagtaagtctcatgagatctgatgggtttatcaggaatttccacttttgcttctttctcattttctcttgccactgccatgtaagaactacttttcatctcccgaataattctgaggcctccccagccatgtggaactttaagtccaattaaatctctttttcttctcagtcttgggtatgtctttatcagcagcctggaaatgtactaatacagccagatacaactagggacaactagagacagtctctatattccaaaactcttcagattatttaaattagccaattcacagggaacctgcaaaaccctgctaaacccactctgcttgccataagtaagctgtcccttcatgctccagcttgctattacccagtcccatgtgcatgaccttggtggtccagcctggcagttttctctaccttgcagctatatgtaacaacaagttatgactttcacctatataagtgttagtgtattgtgccccacaatcaaaaaaatgtttaaacctgggccaggcactgtgactcacacctgtaatcccagcactttgggaggcagaggcgggtggatcacgaggtcaggagattgagactatcctggcaaacattgtgaaaccccgtttctactaaaaatacaaaaattagcgtggtggcgtgtgcctgtaatcccagctacttgggaggctgagtcaggagaatcacttgaaccagggagtcagaggttgcaatgagccgagatcatgacactgcactctaacctggtgacacagtgagactctgtctgaaaaaaaaaaaaaaaaaaaaaaaattaaaccttataaaacaactacttgccagcaaaattttatgtgctggaaatataacatggaataagctaacaaaacccttccctcaaataactttccttctcatggattttgaagcaaaaacttaggggaatataggatattacacaaaaaagtcttctgtccttcacatatacatgcaactttttaaattaaaaaataaattattaaacatggtcaaatgttaggtcaatggacccatttttactaaaagttcaatgatgataaaaattaggtaaaggagaattgggacatccaactcatgaaagctaagacatacaggatgggtaagggaaaatgttctgtctgcattttacttgacatttgaatacatgtagctctgagctgtactatgaaacttaacttgaattcatgtgcactgagatatattctttttatcactgttcattgccctggtaattacagtattgactgaaagcttagtttaatttgtatcaattatccaaaaactatatatatatatatatatatatatacacacacacacacacacatatatatatatatacacacacacatatatatatatatattttttgccttctggatcaaagcttgcctgagaacattttaagtttatttatacccttgaatttaatctggtaaaacccactgaagttgtcatcagcgggtgtcaaatgagtcctactgatgggatgatgatttctaactttacatgcaaacaataaatgttccaagcctctaatgatgtttttttctattttactcaaaataacttcttttttcacaatttaatggatactataaatataaatccatagcttagtagatatatttggaacaataaactatataatcttctccattaagtattgtgtatcttcaaaaaactagttcatttaattctaaaacaaaagaaatgagtcaataaaatcaacactttcattgagtatccactgtctatcagtcaatctcataatcgtttcacttacatttcttatttagctcttacaataaacttagtttccctcattttatgaatgcagaaactaaagctcagattggttaaatgatttatgcctaatatctcagtaggtgatggataaggaattgcatctgaccctaaatttagccaatatactttccactttcccatactgttcactgttcaaggtcttttagtttgagtggcactaaagttactcagacaatcagttaggaggcaggacataatatcaagggtttcagactgatatggtttggatgtttgtccccaccaaatttaatgttgcattgtaacttgcaatgtcggaggtggggtctggtgggaggtgactggatcataggggaagatttctcatgaatggcttagcaccatcccctcggtgctgtcctcatgatagtgagtgatttctcgcaagaacttgtcatttaaaagtgtggcacctcccacctcgctctcttgctcctgctctcatcatgtgatgttcaagctcccacttcaccttctgccatgattgtaagcttcctaaggcctccctagaagcagctgccagtgctatagttcctgtacagctgggagaaccattagctaattaaatttcttttctttataaattttccagtctcaggtatctctttatagtaatacaagaatggactaaatacacagactgtgggtcaaactcttacaaatgagacaagtcctagtcatgatcttagcccaatggatgcatctgaattcaagccatcgaatggaatgcacataaagataaaatttggtttgacatgagcaggtgggttagtattgtaaaggacaaccaagtataggccaatttagctgtgctcccaagcagaataaacctgggtattcttggcagaagaatcatttggaaatggagacagactctggttagagattcagtcctgaaccagggctatatctcaaagtttctgtgggtcaggaacatctgggtatagtttagatgtgttatctacatcagtgttagaacaggctacaatcaaagtatcaactgggttgcattttcatctggaggcttgattgtagaagtggtcactttaaaactcactcaagttgctccagaatgaattttctttgggcggtagggctgagaatttcagactttagctgatcattagccaatgccactttagttcctgaaggagacccacagttctttgcctggtgaccctcttcatgggagtttgctatacagcagcttgcttctacaaggccagcagaagaggaggagtgagtctgctagcgaagatcataggtcataggtcttatatacacctgagaggggaggattacagtgttgaaagaaaagtgtgaatgccagggtcagggatcataaaaaccttattaaagtctgtcttccctacatagtgaaacatactaatttccatctatttagcactgtattaagatagatgcctaatcaggtttgcaatatatttgatggtatgtttggaagaaaaagtgattgctctccacttcttgatgcagttttttaaaaatgtggcttcagagaaagtatactctcttttttttattatttgtcaccagctacactttcacatgttggaggtctcaagatttactcattagtttatccctcaaggcacttctctgtttcaatgtattaggggtcacattgcctcatacttctctgtttcttgtgcttgtttctttcatctcatctctatgaatactcactccccaaattacttaatttggtttcacagcttggcatatcatctatatattgcatactaccaaatcaaacttctctgtttttgaatatccaacagcctacttaacatctccatcccagtctctcaaatgcctctaaaacttaagtccaaaactgggctcttgctcttccctcaaaatctgtttatcctttcttatttcagtaaataagggtcagttcttccagatattcagaccaaaccaaaccaaacaaaacaaaaaccttggtcttatccttgaatttttttcacattctgtcataacttacatccaatttgaaagcaaatattttgctggctctaccttcaaaatacatctaaaatctcaccatatctactattcctactgcaaagtctctgatgcaagccacagtcatctcctattaggactctttcagtacctcttaggggctcttcctgattttctactcttagcctcctacagcgttttctcaatgcagcaagggaatgaggactgtataatatacatcagattatgccagtcctctgttcaacttattctcaaggtttataatttaagtggtctacatgggttcaaatgatttcactgtccactgtttacgtaatatctctccctattattctttccttggatcactctacttcagtaaaactggagagaagcatactttggcctcaaagatgttgcattttctgtccctttctcctagagtgcacttttcctggatatccacatgatctgctgccatatctctttaaggtctttactcaaatatcaccttatctatggagactttcctgtctaccctatcaaaatgaacaaccacttcatccatctccaatccctgtcatgtttatatccacagctcttaccacttgaaaatccacttctcttgttaatatatttctgattctattttcttttgacctctgcaaaggcatatatttttgtaactcattttgaactgctgcatctccagagtctactctagtttcaggcatttggtgagtgttcagttaatatttgttgaataaatgaattgactaggtcagctacattgattaatttcaaatgttaaatcaaacttgcatttctgggatcaactccatttggacatgattcattatcctttttatatattgttgcatctgattttccaacattttatgtagaatttttgcatctaaggtcagaggcattgaaattctcatacactgttagtgagaatgtcaaatagtacaatggttttgaaaaattctgtcttatggcccagcctttctacacccatgtgttaaccaagataaacgaaagcatagtatgatgaaaacaattgtacataaatgtatatagcagctttatttttaattgcaaaaaatgaatccaacccaaatgcccagtaataggtgaatagctaaacaaattgtagtatagctatagaatggaatattacccagcaatataaagcaatgtatcattgatatatgctacaacaaggatgcatcataaataataattctaagctaaagatgccagatgaaaaagaatagatactaaacattttcatttaaatcaaatattcaaaaatgtaaactatagtgaaagaaaatcaatttgggttacctggggatatggtggtaaaagggatgggtaagagggattatgaagagatacaaagtaacttttatacacgacagaaatgttcattatttggacttattgttgtgtgcatatgtcaaatatatcaacaactttatgttcatcttattgtatgccagttaccttaattaagctgttttttaaaaaaggaaaataaaaggtaattgctacaatacaattttgtgatgcctcaaatgatggactatcagtatttaccctagaatttgtcagtttagagatgtgttctaaatggcataatttttatatttcatatgaattataccctgctttttagttcaattcagccaataatgatttttggttagctaattcaaaaatagccaccgttttctggagatgatcattttataatgattacagtgagttagaaacttccatgttaactcactattgaattttttctagctcacattaatgcaatatctgatcaggagcagatagaatgataaaaacttatttactgcagttggcttttcctactacttctttgttagtccagtgaaatttatacatataaataatactgagcctgaattgtcactgaaactactttttaaaaggctcctttctcatatttattgaagatggaaaatgcacactttctgccaggatgtgtacatggtatgtgggagagtgtgcaataaattagaaataatctatgttttatcactctattgctatatggtcaagggtattgtcaaaaagcccattcaaagggatacattttctccttcagaagggaaattgcatgatgattttcaatttgcgtgatgtgacccaacctccaattctcccttgtctgtgacttctgactttattgtttgagcacaaaatatatttaaggaacaagttgaaaatagacattataagaagaagtgatgctttcagaaaaaaaatcaatgagttaatagatctttggctaaaatccaacaactatttgtctgcttcaaataatcttgtctctagctctcttcagtccagacgtctgcatgcaattacattggatgctccccctatatatatatggacagaaaaaatagagtttttaaaacaaggatataggctatttctgacagctttctgtagtattgaagcctttttcaatagtcatttatgctatttcttttctgtgagaaactgtatagacactaccaaatgatgcagaaactaccaaaacaaatttttaaacaaatagtattacaaaatagaacacaaggaacaacacttacagagttatagttcatgtaactatggagtgtgtgtgtttgctgtgctttagaaaaataagtgattgaaagccaaaggaatctaaacaggtgtatgttctctcttacttaaactctctgttggatatcattcgtttttcttttccacatttaccttcagtcctgttttgtccttcaaatgaaacgcatttggttacataaaagtctttcttggactcagactgttcccagcgatggagatatgtgtgggagcctgatggggagctggaactcctgcctcccaccagcgggaaggaggaactacccctctcagatgtcaatggaggttgaagggggatccagaactgctaccttaatctgataataatgaggtggcattttctgtggccaggacagtgtcaagccaggtaaaatagaggtttaaatattaataatatccagaccttcataaaacaatacccaatatctctaggtttcaactgaaaacaatttgtcattcaaagaaccaggaacgttggagggggaatgtaaaaagataatcaatagctgtcaatactgactgacagagacattagtattatttgacaaatattttaaagcagcgaccatgaaaaacactttaacgaccaattgtggacgtgtaaaataaataacatttagaaaatctgagcaaataaatggaagttgtacaaaaaaaaatgaaaattttagaactgaaaaatatagtaatacttttcaattaatttaatgaagctattattactccataccaaaaccacacaaaaacagtacaaggaaaagaaaactatagaccaatattcctcatgcatatagttgtaaaaaacacttaaaaaaataataacaaatcaaagttagcaatatataagatttaggtagggtttttttttaaacatattttgcatcagattttctctaatttcattctaggaattagatatatcagaatcttctcaggattctgaatcttttttttaaaaaatctgaataattattttagccctacctttgtagattcttattccactgtcctttgtgtgtgtattgttgggtatggtatcagaaattcggctattaaaaaattccccagattctgaagtgcttgggaaaacactgtcataataaataaactggcaaatagcaattaaaaaatggcaattaacatggccagtatttgagatcagcatatcttcttaaagtttatcccagactttctacatgctggtctcagcctggaatgtcctttctcttcacagggccagagttttacagaacttagaagtaccattcacatgaagaataatattatgtacaggaggcaccctttccatagctccctggagtcctgggagcctatcgccctgaacccttacctacttccactccttcctttgcatccctcaagtctcagcttaaatatgaattcttcaaggaaacccacccagacctgtgcccctaaccccagatgaaatgaaatattcctaacactttcctagcaaccagtactttgctgtaacatttactgatgtcaaaattaaataataatgattatgttttaaaatttctattctaataattatcatttcttctggaaatgaagagtattccttcagagtttcataatctatgtgtgggaatctggactttttctatggacaaaagaaagctaataaaagaaaatacacatgagaaagaaatgatcagattcatattcacaatatataacttagcctgagtgcaggggatgggaaggagagggaagcgggaaggacctaccagtcagggaggccagttaggaagtctgtgtagatgagcccctggtggagtcccagcatagcactgatgaagatggaaagatgtagatggaaagatgataaaatgggtagacttgggagggagaagaaatgatcaagaattgtggattggagaccagatgctcagaagtggaaggcagggccaggcacgatggctcacgcctgtaatctcagcacgttgggaggctgaggcgggtggatcactcaaggttaggaattcaagaccaacctggccaacatggtgaaaccccatctctaccaaaaatacaaaaattagctgggcatggtggcaggcacctgtaatcctagctactcgggaggccaaggcaggagaatcatcgcaagaacctgggaggccgatattgcagtgagccaagatcgcgccactgccctctagcctgggtgacagagtgagactgtctcaaaaaaaaaaaaaaaaaaaaagaaaagaaaaaagaaatggaaggcaggaaaagctgatttctgagaaggtgatggcagtcagctctgcaccatcgtatgcttaattaaaatatctaatacggtttaattaagtatgcaatggtgcagtgcttctgaacacgtgggatcttgaccagctactacagcatctcctgggaacttgatagaaatgcaaattctcaggtccccactcctgactcgctgactcagaaacagaggggagaggggagaggggagaatcccagtcatctgagttttaacaagccttccatgtgattcagaaacatgctgccatttaaaaccaactgcaacagtgcttcagtgtttgggtataagtatcagctcttccacttagcagcctatgagaccttgaccaggttagttcatctttctaaatctccttttccctcctgtgtaaaataaagattgcaagacttatgttgagttagataaagcacatagcattataattagcaattaatagttataatgcttgatgttttttgtcacacacacatgaaaacatatatctatgccacagcctttggtagcaaataaaactgacttccttgctgtctgttgggaggagaaatgcttgtagaggacccttaatttatccagcaggaaaagagctacaaatttattctcctatgttctaatcatagcactagagaccaaagaaaatttttggtaaggtaaaggattagaagcatgtgtaattatttttcatgaaagcacaggaaagttgatattaaaggcctttaaagggacaaatctcagcacgttgtacttttatgtttgaaagggagagagagagacaggttcagggccagaaagagcaatgatccataaggctggtactttgattagaggaaaggctactggaatctagttaggcatccatcctttttactttcaatttcatccttaaaagttgtctggatcaggccagctctgtccgccagttcttaactacaaagagttgggagatggtacctcaagacagcccatcttcttcaatcattttgaaggaaactttggcgataaaagcagaactgtgagcaggtacattttaattcatagttaacaaaagaaaccattttcattctgcatggccaaataccaggctattaaaaaaaatgtatcaatgtgataggggatgctaagcaaggctgcatatgtgagtataactgactggtaaaaaataaattgaacatgaaaagactaatgctttgtcaaagtggaacaaaaatgagcaaggaatacaaattgctggagataatggttgccatggcaattgtttgtccaggcccaaactgtggtaacttaggtaagagtaacagaaaatgaaagcttttagtagcacttccccactatgattttgttgctgctgcaggcttggttagtatgactcaatatcccttcctggccctctggaagccccaacacaattataatttgctaaataaggaagaaggagatttgcttaaatcccactcggagcagcaggtcgtttctgaaatcatcattatttaccaaacacaccagacgtttcaatgtggggtgatgtgagttggcacaatttttctgatgccccactcccccaaaaaacaagtagcttccttctactaaaatatatagtggtgggattaaaaaaaatcagggttgcaaaatgctggattgaagaggtaacacaacaccagcagctccattttctttcctatgcatggctatcgatagccatttctcccacatgattacccatctgtttgagatgcttactgcatcatgcaaatgaaatgcacctgtttgcagaaagacacgaataatctggtttccaagtattcttggctctcaaacttgcctttattgactccgtgtgtgtgtgtgtgtgtgtgtgtgtgtgtgttttcctttcataatcaaattattctgactctagattttccaaattcatcttttcaactttcctatgaaaggtgtttaggggagaaaaactaaaataattaatgaatcacatgggaagagaaggagattttggaggagaggaatggtgtagaaaatcaggttgcccattctcctatgttctgtaaccataatttagaatcttatcttgcatggtttgttggtgagaaatgttaacatttgcatttcaaggtaaagaaaggcttttactgatggccagtcaccagggaaacttaatgagaagttacagtggttggatttgtagcaacttgttttctgtagtatccaggcagcagacggctttgtgcacacaaatacagaaagtggactgcttgttaggtatcatatctaattagctagaacccaaaaaacttctgctaatgatatttttatgccaggagagtttgagacattgcactccagtttggatgtttttaaagagtaagaatctgcaggaattacacacacaaataaaactgttaacagatacttagagctgtacacctgttacatcattggattctcaccacaatagcatgaggttgggtatcagttttctattgttgctgcaacaaattatcacaaactttgacctgaaataacaccgttgtattatttcacagttctgtaggtctgaagtccaacacacgttttgctggactaaaagcaaggtgtttgcagtgcgttgttcctaactggatgctctggggaaggaacctgatatcatgcgcattcatggtgttgaccgaatctggttctttgtggttacaggactgaggtccccggttccttcctggctgtcatctgtgaccatctttaactaatggaagcctctgtccagcccctgcaagtagcccctctgcatctctgagctagctagagtatcaaagccttctgcttggaatctctctgactactgccactttgccctgcctccaggtgcagaaagttctctctaattaaggactcatgattgggccaacccagataacccagggtaatctctctattttaagatcattgattagtatattcaattatatctgcaaagctcgttttgccacgtggcatcacatattcacaggtcccagagattaggaggtgaatgtcctttttgggggacattattctggcataaaaggtgggtaatatcattatctccattttgcaaaaagaaggcactagttaaggtggttaagtaacccgacagaggtaacacaactagtaaatggcagagtcagaattcaaatgctgtcttgactcaagaagtcaatctttcaaatactatactgtattgtttccaagtgactaattggtaatgtaggtggaagttattataagcaccttctccctcctgcctccaaatgcattccttaatgtgcaagtcatttcatactgagctggaaattatttgtcagaaagtatgcatggaagaattaatactgtggagatactcaggagcaatatcaaatagccctttaatagcttttcatccagttaaattgatcaaattgtactggagacgcatggaaattctcaaaaatgcttcctcgacctcctgtagtagatttcattatggtttccaattggttcctctttcctgttatggaattccatttccctacatttactatgacttaatgatagattatgtatatttccatgctctttaacactgggcttgcctgaataacttgctttgattatggagatattaaggttaatagtactaaccaagctgtaaatgtatttgaatagtttgtgtttttctcttgtgttcccatgatctcccatgaaaaggacattcagtgggcagctgctagaccctgaatattgaaggcatgcagagtagaactaaacccaacccacagcctagagcccagcccaacccagcccaagcaaatgagccaaaccccacagacctgaaatctatgaatgagaaaagtaagcccttgtttttgtcagacactgaaaatttcagagttttctttcaatagtgtagcaatattgtggaaaaaacaaattcaccttccctgaaggatcagctttcactaataatttcaatggtttaaaaagccatatgcttggaagggaaccaaccgtgttaccctattcatatctcatagttgtccaggggcctttccctcataaagcattatccataggggatatgttttttatctcttagtgactaaacaacatcatcaaattttggaggagtcaatgaagtaagacaggaagagaagcagtaatattggacccatgtcagagagaaaacttctaaaaatattttctaagacataaatttgaatcacaatctgccatttactttgtaatgttgactatgtgagttaaattgtccagcgtggaaaatgtgaatacctccctcatttgattattataaacaggaaatgataaaatgcatcaaaggcctgcagcacaatgtctagtatatagtaagagctcaataaatgctagctactaaacactgacagtaaggaaaagatgtttgcatttgttcattcattcattatttcagcctctgcaaagatatcacagatgcttgcttccttccttccttcctgcctgcctgcctttccatctcctctttccctcctttcctcccttcttccttttcttccttccttctttacttcttcatttcttcaacgtctaggcactggaaatttaaaatgtttgagaggcacagagctaagccatagttagataagtggactaatgaacaactgcaattttcactttaaaaaggaagaataatggttggctgggcctggtggttcatgtctataatcccagcacttttggaggctgaggagggtggatcatctgaggtctggagtttaagattagcctgaccaacatggcaaaaccccgtctctattaaaaatacaaaattagccgggtatggtggcacatgcctgtaatcccagctacttgtgaggctgaggcagaagaatcgcttggatctgagagacagaggttgtactaagccgagattgccccattgcgctccagcctgggaaacaagagggaaactccatctcaaaaaataaaaataaacaataaaataaaaggaggaataatgggacatgacttacatgtttttactgatgagaataaactttgcatttagttaaattttaatatgcagctttcatctcagtgaagatatgtattcaggttattaaacaatggccatcatcatatggtagacttctagaaggggagccaatagttatgatttctttgtggctaacatttcttacaatctaggtactccaaagagtccaatattatgaaaaacatgggtccaataatcataactgagcttgggtccaatattactgcttcttttcctgtcttccttcattgactcctccagaactttgctatgttatttagtgaccaagagataaaaaccatccctagagataattctctgttagagaaagacctctggacaactatgagatatgagtagtgtaacagggttggtttccttcaaagcacagggctttttaaaccattgaaattattagtgaaactgatccttcagggagggtgaatttgttttttccacaatattgctacactatgaaaaaaatcctgaaattttcagtggctgacaaaaactgggctttagggatccatgacttctgattttgtatcagattttacttatgtgtacaaatgttgtctgagaagaatatccacaggttttatcaagtttttcataatcttaatctaatttttaaacttcagatgatattcttaatatttaacaagatattaagaattgctgctcttctacaagccacttaaccttatgtgtgtcatatctgtataatgaggttattattctttaactcagaaaattatgagaaaattatgagatgaaaaaatgtgtaaaatttgaactatacaaagaaaggtctcatgagatccctgcttttccatatcatgaccaggaagtctaaatttaattgtatgtcagtctctacttctactagttaagtgttgataagttttcaacgcagaacattcggagctcagcaagcctgtggtttccagtgcttgaaatgttcaataatcacagtgtgatttgatttctctccactgggtctctttaaagttagaaaggtaaacatcctaggctactttttatctcagcttaaacctaatggagctagagccatctcattttcatgagacattggtggcacagtgatagtaagtttcttcctagcaactcaattatttctaatgatttacacaagataatcaccgttgataaatatccaaattcttagaatgaggaactatctctttctatgtccagttttatatcttccattggttgaagcttttgctggtgatcagatgtcagagatgtggaattgtcaacgagaatgggaggagaagagacgaacagggagtaaagatgtaaacatcatgcatccttgagtgcatgaaagcagaaataatctgattgtgttgtccaggactctggcttaaagtaaaagaaactaaattcatcatgactaacagtccaatgtgttttatgcttcagggatggctggttccagaggattttaggatttttagataatgtgtttcccttgctgtctcttaacttagccactctattttttggcctcctgcatcgcccagctctctccacatggtggcttcctgcagcgacagatttgtattattttacagttcataatgccaacagaaagtgagttctctttttgattattttatctgaagtcctagaattaagtctcattggcctatcttgagtgttaaacacataaaatacccaattaatatgctcaagtcatggaaccctttgatgaatcaaatgtatttcatgtacccacagccagagctagagcataataaggttaactcacaggacttacatggtaccccacaggaaaatcaagtctcaaacaaatgggacagccaagaacaagaactgtctactgcattgtgcttaaaaactagcctataaaaatcatgttgagtttttattgaatcatcaaatattaaaaatcatagggactttgaatcttctatttcaaacttctctttttatagatgtaaattctgaaacaggaacgacttcagaggccagtctagagtcagacagcaagtgatagtgccagaaaaggaaactgggactccaagctcttatgctccattgtctggggaaaatgtttacattcgtagataaagacacagctattatatttatcatggagcaaattttcctcttattgcttttttctgtcctcctttcattcagtacatatttattggagagctactgtatcatccaaggctttcacccctaactctttattgagtccttgcactgtacttagccttgattcaacatatatttgataagcagcctatatgctaaatatgtagctgggattggaaataaaattaaggataacatattctagatgagaagcaaaacaatcaattaaaaatataaattatggcaagggctttgaggcaaatgacacgtaagatgtaatttggaaaagatagagatgttaaaaaattaacctgaaagatagggagaaattagctatacagcacgctaggaggaagtgtattttaggggaaaggattctcagaagggctgtggctagaagttcaaaaaacacatttggtaagagcttagagaaggagttaagaaagtttataaatgttcatggccttgtaagccatatggtatctgctatccaaccctactgttgaagcatgaaaacagccatatgcgatgtgtaaacaaataagtatgactgtgctacaataaaactttatttataaaaccaggtggcagacagaatttgctgacccctggcatagagattgagagggagaagcaggagatgacattggaagataggaaagaattttgaaggcaagaggaccactgtggctttaggtcttgaaggatctaagtttttgcctaaaaatattattatttttttttttttttgagacggagtctctctctgtcgccaggatggagtgcagtggtgcgatctcaactcactgcaacctccacctcctgggttcaagcaattctcctgcctcagcctcctgagtagctgggactacaggtgtgcaccaccatgcccagctaatttttgtatttttttagtagagacggggtttcaccatgttggccaggatggtcttgatctcttgaccttgtgatccgcccgcctcgacctcacaaagtgctaggattacgggcttgagccactgcgcccggccaagaatattatgattttaagagtggttcttttttcatgttgttcttcttttaaaatttatcataaacatttaaatagcaggtcatgttagaggtcgtctccgtggtatggtttggggatgacaaaacatgccccctctttggctccagtcatattttctatacaccttctttgtgcgaggttctctcacttggctttacgttccattattcctttcggctgaaaaatacaaatggagaattatggacaaataagatgacagcaataacaaaaattaatcctgaaaatatatgactgctctcagggtatgagattggtgactagggaacagctccaagcatgtcccttccttaggatttctctgaagtgaaatgttaaataaatgtgagacaatcttctatttttccatagagaaggtttcatttaatttgcatttcagtggtatggtggtatttttctgaccatgatggtagcatattggtgagagaaatcaaatacatcattttttttttgaaattcagattgtgaaacagaataatattcatgtttactaatggaatagaggaaggataaaaatcaaaggaccagaagaaactttgatgcactgtaatcaaaaaagaaagtggatttaaaacaattaaggacacgtagttcattgaggagacttcccacaggaaacaaattgctggcccacagtgccaagattcttcaatcatgtcagaatacatcttgattatcagtagctgaggttgattggtacactttgctacactttgctactctcctgtttagcagttttaggagaaaatgaaagcagtatcaaggtaaaaacctagcacattcatcagtcgaaatttgctcatcaaaagcattggttgttctaatgatattgttgacactgatatgcgtgtcaaaaaggagtatcctcctctgacgcagggaagttgagggctttgttgagaaagtttaagcagggagacgtggtggagtttcgactgtttggtccatccctatcgctgtcattttaaaggactttcagttctgtctgttcaaccatgttctgtaaagttcaagaggaatttaatttcggttttctctcaagcctaaaatgtatgattataattcatcatgaaataccaatggatatttgattaacaggaaattgaactcatattgtttttggttgtatgggttttcaagtattctgcaccttagtaatattttatttactaatattttaaagtaactttccccccatcatataagagtaatacatgtttattgatttggagaataaaatggaatgataaaataagtataaagcagtgcatagccttttccttagtcaaatattgtatcatttgatgtagattcttctagcttttctttccttttatgtgtatgtgcttttataaatatgtatgtgtacaaatttttctcatttgcataaatgtagactatgttatacacacacttttatgaattgtattagaaactatctttcattaacatttcataacatttttctttctcaatagtggtagtatctggttgagagataaaacaacatctctttcattagaattgtttttttctttcatttaagttcttgggtgcatgtgcaggatatgcaggtttgttacatagaaaaacacgtgatgggttggcccagcatgaatttcctatttttcatgatgctctccttccgccgattatcccccacagacaggccccagtgtgtgttgttgccctgttatccatgtgttctcattgttcacttcccatttacaagtgagaaatgcagcgtttggttttctgttcctctgttagtttgctgaggataatggcttccagctccatccatgtccctgcaaaggacatgatctcatttctttttatggctgcatagtattccatggtgtatatgtaccacactttttttaatccagtcgatgattgatggacatttgggttgattccatatatttgctgttgtgaataatgctgcagtgaacatatgtgtgcatgtatctttacaacagaatgatttatattcctttgggcgtatatccagtaatgggattgatgggtcaaatggtatttctggttctaggtctttgaggaattgattgccacaccatctttcacaatggttaaactaatttacactcccaccaacagtgtaaaagcattcctctctctctaagcctcaccagcatctgttgtttctttacttttttttctttcagacacacagctctgatgtttattgactttttaataattgccattctgcctggtgtgagatggtattttattgtggttttgatttgcatttctctgatgaacaaagatgttgagcttttgttcatatgtttgtggctgcataagtgtcttcttttgagaaatgtctgctcatgtcctttgcccaatttttaatgggtttttttttcttgtaaatttgtttaagttatttgtagactctggatattagacctttatcagatggatagattgcaaaaattttctcccattctgtaggttgtctcttctttctgatgatagtttcttttgctgtgcagaagctctttagtttatttagatatcatttgtcaatttttgcttttgttgaatttgcttttggcattgtcatcatgaaatctttgcccatgtttatgtcctgaatggtattgcctagattttcaagggtttttatagttttgagttttacatttatttatttaattttttttagatggagttttgctcttgttgcccaggctggagtgcaatggcatgatcttggctcactgcaacctcctctctctgggttcaagcaattctcctgcctcaacctcccgagtagctgggaatacaagcacccaccaccacaccaggctaattttttgtatttttagtggagacggggtttcaccatgttggccaggctagtcttgaactccagacctcaggtgatccacccgccttggcctcccaaagtgctgggattacaggtgtgagccactgcacccggcccacatttaaacctttcatccatcttgagttaatttttgtataaactgtaaggaaggggcccagtttcaattttctgcatatggctagtcagttctcccagcaccatttattaaataggaaatcctttctccattgcttgttttggtcaggtttgttaaagttcagatggttgtagatgtctagtcttatttctgagttttccattctgttccattagtctctgtgtctgtttttttttccagtaccatgctgttttggttagtgtagccttgaaatatagcttaaagttgggtagtgtgatacctctagttttattctttttgcttagaatcagcttggccatacaagctcatttttggttccatatatattttaaaatagttttctctaattctgtgaagaatgtcaatggtagtttaatgggaatagtattgaatctataaattgctttggccagtatcgccattttcacaatattgattattcctatttatgagcatggaatgtttttccatttgtttgtgtcctctctgattttcttgagccgtggtttgtagttctccttgaagaggtacttcatttcccttgttagctatattaccaggtattatattctcttcgcagcaactgtgaatgggaattcattcatgatttggctctctgcttgtctgttgttggtgtataggaatatatgtggcttttgcacattgatttttgaattctgagactttgttgaagttgcatatcagcttaagcttttgggttgaaatgatggggttttctagatataggatcatgccatttgcaaacaaagacagtttgacttcctcgcttcctatttgaatatgctttgtttctttctcctgcctaattgccctggccagaacttccaatactatgttgaataggagtggtaagaaagggtatccttgtcttgtgccagttttcaaggggaatgcttccagtttttgcccattaagtatgatattggctgtgagtttgtcataaatgtttcttattatcttgaggtatgttctttcaatacctagtttattgagagtttttaacatgaagggatgttgaattttatcaaaggccttttccacatctattgagataatcctgtggtttttgtctttagttccatttctgtgtattgaaccagcctcgcgtcccggggatgaagctgacttgatcgtggtggataagctttttgatgtgctgctggattcggtttgccagtattttgttgaggatttttgcaccaatattcatcaggaatattgggctgaagattttcgtttttttttttttttgttagatctctgccaggttttggtatcaggatgatactagcctcataaaatgagttagagaggagccgctccttttcaattgtttggaatagtttcagaagaaatggtaccagctcctctttgtacctctgttagaattcagctgtaaatctgtctggtcctgggctttttttggttggtagtctatttattactaccacaatttcagaactcattattgatctattcaggaattcagcttcttcctgattcagtcttgatggttgcttgtatttctgtggggtcagtggtgatatcccctttatcatttttttattttgtccgtttggttcttctctcttttcttcttcattagtctagctagcagtctattttattacattttccaaaaaaaaaaaaaaaaaaaaaaaaaaacagctcctggattggttcattttttttgaagggtttctcgtgtctctatctccttccgttctgctctgatcttggttatttcttgtcttctgctagatttggggtttgtttgctcttggttttccagttcttttagttgtgatattaggatgtcaatttgagatctttctagctctttgatatgcacattttagtgctataaatttccctcttaacactgctttacctgcatcccagagatgctggtacattgtctttgttctcactggtttcaaagaacttcttgagttctgccttaatttcattgtttatccataggtcattcaggagcaggttgttcaatttctatgtagttgtgtggttttgaatgagtttatttatcctgagttctaatttgattgcactgtggtctgtgtttctgtttgtatgatttccgttcttttgcctttgctgaggagtgttttacttccaattatgtgatcgattttagagtaagcgctatgtgatactgaaaaaaatgtatattctcttgtttttgggtggagagttctgtagatatctattagttccacttgatccagagctgagttcaagtcctgtatatctttgttattttttgtgtgtgtgtctcagtgacctgtctgtattcacagtggggtgttaaagtgtcccactattattgtttgggagtctaattctctttgtgggactctaagaacttgttttatgaatctgggcactcctgtattgggtacatatatatttaggatagttagctcttcttgttgaattgaaccctttaccattatataatgcccttctttgtcttttttgatctttgttggtttaaagtctatgtcgttagaaactaggattgcaacccctgcttttttctgctttccatttgcttggtaaattttcctccatccctttattttgagcctgtgtgtgtctttgcacataagatgggtctcttaaatacagcaccccaatcagtcttgacattttgtccagcttgccattctgtgtcttaattgggacatttagcccatttacatttaaggttaatattgttatgtgtgaatttgatcctgttattatgatgctggctggttactttgcagacttgttaatgtagttgcttcacagtgttattggtctatgtacttcagtgtatttttctagtggctggcaacagttttttgtttccatattttgtgcttccttcaggagctcttgcaaggcaggcctggtggtgacaaattccctcaatatttgcttgtctgaacaggattttatttctacttcccttatgaagcttagtttggtcagatatgaaattctgggttggaaattcttttttttaagaatgtcgaatattggcccccaatctcttctggctcttagggtttctgctgagaggtctgctgtcagtctgatgggcttccctttttaggtgacatggcctttctctctggctgcccttaacattttttccttcattccaacctggtggaatctgatgattgtgtgtcctggggttgatcttctcatggaatatcttcctgaggttctctggattttctgaatttgaatgtaggcgtgttttgctaggttggggaagttctcctgcatgatatcctgaagtatgttttccaactcggtttcattctccctgtgtctttcaggtactctagtcataggttctgtctttttacacaatctgtggttctcaggggctttgttcattccttttcattctttttttctctaacgttgtctgcctctcttatttcagcaagatagtcttcaagctctgagaatctttccttcacttggtctactcagttattgatacttgtggttgcattgtgaagtttttgtgttgtgtttttcaactccatcaggtcatttctgtttctctctaaactgtttttctggttaacagatcctgttatgttttatcatggttcttagcttctttgcattgggttagaacatgctcctttagctcagcaaagtttattattacccaccttctgaaggctacttctgtcaattcatccatctcagcctcatcccagttctatgcccttgttggaaaggtgttgcaatcatttggaggagaagaggtgctcaggctttttgagttttcagcattttggcattgattctttctcatttttgttggtctaccttttatctttgaggctgctgacttttgcatagggtttttgtgagttttttgttgttgttgttgctgttggtgttggttttgcttctgtttattagtttttctttttatcaggcaggcccttcttccatagggctgctgcagtttgctgggggaccgctacagaaaaaattccccagggtccctcccgcacgtggaggtatcactggtggagtctgcagaacagcaaagatggccgcctgttccttcctctgggagctctgtcccagaggggtaccaatctgatgccagccagaatgctcctgtattaagtgtctggcaactcctgttgaaagatctcacccagtcaggaggcacaggttcagggacctgcttaaagaagaagtctgactgcaccttggtggagcccatattgcactggggagaatcatcctcctcctctggacggccagcagacaggaaagactaggtccactgaactgggacaccttggctgcccttcccctctagaggccccttcccagggatgtcagagttctgtccctaaacccctggctggagttgctgaaattcttgcagggaggccccaacccagtgaggagggatgaatttatgtccaacttaagcagtctgtccgtaatctgtcacagccactgtactgcactggggagaattcctctgggtccaaaccacccagtcttcccagcatcagccagggaaaacaacctacccactggagccatagtgatggtggccgcccttcccttcaggaacttagtcatcttaggcagtgtccggcctgttgctgctggctgcaacccaagtgggttgcacagctctgtgcttaggacccaaggccctcatggtctcataaggggatctcctgatactggggatgcagacatctgtggaaaaagcatggtttccagggcaggatagcacaatcactcactgcctcctttggctgggagtgggggctcccctggtttcatgccactccccggtgggccatcgaacaaccctgcttttccttgttctgtgtgggttgtgccaactgcctagtcacctcagttgatggggcaggattgactcactgtttttgttcttcttggtgggagccacggaccagagctgcttctggtcggtcatcttggcccctcctcattattagaattttttattctgttcagtgttttgctattttaaagcacttcaataaacatagtacatggtattgttttctattgatattatgttaattaaacccaaaatggtatctctccttaaatctttaagaaaaaaaataaatgtaagcttaagaatttttttaaaggaaaatacttagttgattttaaaggctgtttataaatgagaaaaaaagagaacaaaagaaagttcagtaaataaatacaaagttaccgttttttcttggttatagtaattcctcaatttaggtacagttcctcttataaaattttgtttaaatattcctgcttttcctcaacacttgggaagaaagagttactcatcactaaagctaagttgttggcatattttgaaagctggttaagggcttcatttgtggaagaaactacaccttttggtatatttggggaaggaaaatggaaagtgtatgctgtagaatgttaggaatcatgagttatcagattgagtaagtttccatttatttttatttttctgagagcttttatcataaagaagtattaaattttgtgaaattctttcttgcattgattaatataattacatggtttttcttctttagcctgttaatgtggtaaattgtatttattggtttttgaatattaaactagacttgcatccttgaaataaaccccactttgtcacggtatggtatatattataaatagtgtatattacacgtgtgtgtgtgtgtgtgtgtgtgtgtgtgtgtgtgtgtatgcgtatccttaaaaggacatagacatctaactgttttatttacaaaatgtaaaaatataacttgggcagagggaattgaaagcagaagttgaagaacttcaaaaccttgcttcctaccctttgctaggaatatcttctggccagtgtgactttgactagcctgccaacgtatagcactgttgatgtattcatctactatatatgtgtatgattgtgaatcccaatatctatccatcataacattctctgttgagtagcagatctttgacattcaccagtaatagtccccaaagccatttctcatttttcaaatccataaatactgaagtgattgttgaatttcttatattccagaattttctgtgcactaagtatcatgtttttccatgacatgccaccatttcacaaattaatcaccatttaatcttttagtacaattttaagtcttacttgatcatttttacaatttttttaataattgtgaatattgatctaaaacacttgatgtaaatataacctagaaaaaaaaatgacaaaaccccaatgtgatactgagccgggttggaggatgtctttatttgagaagtaggatcccgtcctctggcctcatctttacctagacatgaatttatatttgggtaaaattacgaagtactggggcatgcctatttatcatatcagcttatttatgaatgattgaaatagaaaacatggtaaactcagctatctaatgtatactaaatataattagaaaaagcacttcattctttaatcactctataacttagtgttttgtctactaaattactccggaaaaaaatctgaaagcaaaagtggaaatttgtatttaaattctttgtttcccagggcttttgtataccaagagatgctcatggtattttattgaataggaaaagggcaaactactacaatcttagagataaccaatttcttttgcacaaaaatggtactgaatttaaaaatatttatggtttatgaagcattttcattgcaattaataactacctgttagaagccttggaacttaattaaatgtcctgaattataactgtcttcactagccataaacatacttttctctgagatcagtggctatttctctgccatattttatcttgtaaatttgaatgcacattttttgtaaatcagagtaacagtatttatatggcatttgccacacttcaattgctggacattgcctatgctgtgggcagtacagatatatgtgaaactgagtgttttaaggcagtctaaaaaaatgccagataatctgtgcattgttagatgttaccatcacacaccatttacttgagatttggaggaaatcctttgcacagttaatgtctttcctataccattgagccatttcagttaacccactgccaacggttttttatttgagaacacactgattgttctgggaaattcccattgactttaatgttactttaaaagctgccccttaggtatagcctggaaaatttaaggactctgttctctgccagagcaatatttcttcaggataaaatcgaaatctggtttgatactgagaaggacatttcagtttaatgcctgtggaaattcaatggatgcatatctaacagaatctgccatttattttcagatcagatagagaaatggcatggtgttgccactcaaggttggcagagactgaatgttgatgtgtgagtcatgccatatttaaaataagttggaaaatgtaaataaatgaaccattaagctctgacctctgggccaaatccagcttaccacctgtttttgctggtgagtgaagagtagtttttttaatatttttaatacatgaaaaaagttttaaataatattactggaataaaaattatattcaaaattatgatattcaaatttcagagtctacaaataaaggtttattgtagcacggcagtctatggctgcttttgtgttataatagcagaattgcataggggcaagagaggccacatgacccacaaatcataaaatagttactatctgaccctttagggaaaaagttttggaaccactgatatgtatcacaaaaatatgtattcatgctgtttccatcatataaacaatttcatataacaattgtaaatttttttacaattagctgctattttgtatgtgaatagctatacgttttaaaactaattttgataacagagatacatttaattgcttctttatattttcagcatgttagaacactttaataaatataaattttctttttaccatgagataaaatgtttacttaaatgttttctatcagcaaattgatacatttttacattatagaaagttatggtcaaacaagaaaaataaagttattcacagtcttacaactaagaagtaacactttctacatacacacaaataaacacacctagtgcctcgaaaggaataaagacatgtataatttctttaaataaaaagtagaataacttacatactattttgtaatctgtttctctcctttaaagttatttttaaaatatttgtttagaaaactcaaagtatacaaaataagaagctacatttgtatggccaacagtcagagataagtaatgttaccattttagtttaatattttatcctattcatgagttatcttttcattataaatgcacatttttacatgtctgttttcacaagtatgcagtctggttgtacacgctatttgttagctttttcatttaacacttcattatcagcatctttcataaaagaacataaaactttcaatgccattttaatgtttgaaagtgaacataatttttttttatcttttaaggcatgatcatgatttcaaaatggaaacaacctaaatgtttcacagtatctactgtgacatccatataatgaaacagaatgtagtaaataataaaactcttcagagatgaatatcgcttgccatgtcactgaaaggcttatgcaattctgctcccatgcttgctggcatgcttttcattgactctttcaactattgacttcttcttatcattcagctttcaactcaaactttatctcctctgagagaccatccctggccacctgacccaggacctccacctccaataacctctctatcttgtagtcttatttcattgcaaactgatcttctttatttattgatgtcatatgctctgtcctcctttatcagagtataatcatctccagggcaagaagctgtcttgtctactattcttcagtatctggaataatgcctgacatatactaggttctcaaattttttttagtaaatcaatagaataaatgtatgaataaacatattcttcagtttaaaagggttataaaatggtttgaatagtatgctaccactaatgtgatatatacatatacatgtgtgaatatgtgtgttatgcagagaacatggatggctagatagatagatacctaaatagatagaaagacaaaagggaagataaagagtcatctaaccacagtgctactttgcctgatagcctggaataaaatgcacttaatgttaatagcgatttcccttagttggtaggattttacaggacatctttttgatttacaatattttaaaatttttcctctacatatatgaaaagcgctgggaaacagtgataaagctgagcaatgttgattttatactgattttttaaagagagagttttgggagcttagttatctctgtggtcaccatcagaaaataatacatgcttgacaaattcagccttctttaggaagtaatttttaaacttaatttgttgaagcatcactgtgttacagaggttactgttataggttcaatttctttgtggtccagtttttttcttttgtttttagtttccgtgtaataattctacatatatgcagaatacacaatgatattttgttaggtgtatacaatgtgtaatgttccaatcaatatcattagcacattcaccacctccaatgttcatcatttctttgtgttgtgaacatagaaaatcctctcctctagctttttgaaaaatagagtaaattatagttaaccacattcaccctacagtgctgcagaatacggggactcattcctgccatcaggctgtaattttgtatccctttaccaacctgtctccatcctctcttcccactacccttcccagtctctaatacctacagtcctactctctacttccatgagctcaacgtttttttagcttccacacgtgagtgagaatatgggatatttatctttctgtacctgacttattttgtttaacatactgtcctttaggcttatccaggtttctgggaatggcagtatttctttcctttttggctgaataatgttccattttgcatgtatttcacattttctttacccatttgtctgtagatagacattcagcttgattccatatcttggctattgtgaatagtgctgcaataaacatgggggtgtaggtatcatttaaatatatatatatatttttttttcttttggatacctactcattggtgggattactggactatggtaattatatttttaacttttggagaaacattcacactgtttttcataatggctatactaatttacattttcaccaacagttgagttctctattctctgcctcctcaccagcactggttattttttgtctttttgataatagctgttttaactgattaagataatatctcactgtggttttgatttatatttccatgatgattagtgatgttaagtatttcttcatatattatggctacttttatgtcttcctttgaaacatatttattcaaataatttgccaactttttaatggattattttggttttttgctttgagttgggttctttatgtattctgaatattggtctcttgttcagttaaatagtttgtaaatattttcccccattcaacaggttctcatcactctgttaattattttctttgctgtgcagaagtttttcatttgtctgtttttgtttttgtggcctttacttctgaggtcttgccataaaatctttgctgagaccagtgtcctgaagcatttcctctgttgtaataggtttagagttttcgttcttacttttaagcatttattttcagtttatttctgtatccgatgagagggatctagtttcattcttctgcgtatggatattcagttttcccagcaccatttattgaagacagtgtccttttcccaagcatgctcttagcacctttgtcggaaatcagttggctgaaaatacgtggattcatttctgggttctctgttctgttacattggtctatgtatctgtttttataccaatattatgctgttttgtttaccatagctttgtagtatattttggagacaggtagtgtaatgcctctagtttttttctttctgttctgtattgctttggctatttggggtcttttgtggttccttaaaaattttaggattgtttttctctatttctgtgaaggaccctctttctttaaaaaggcctagcactttattatgtctgacaataccatagtacaatagagacacatggcctctaccttaatttgtgaaggaatataaaatgggtgtatgataaaaaataactgggtaatgaacacaatttatgatgcttggagaaaacatctctcagaaaataggatttaagttgagagttgagagaggaaaagaaatcagcaaagctaagagaaattcaggtagagaaaaatcattttctgagaaaggaaagaaccagtgtgtttgaaaaacagagaacagagtgaaaatcaggtgtggcaggactttggcaaatgacagaagagtcattaaacatgaggtgggagactccagacactccaaaaccacagtgaagactgaatcatactctctctcagtgcagtgggatgcacgtgcttgttgtagagaaactgtgacatgacaccaagaggcacaggtggagatagtgaagttcctttccaagcagcaaaacctctttctgtgaaacagggggttagctttcggctttgggctcggaggaggccaaggtgcgactttcttcggtcgtcccgaatccgggttcatccgacaccagccgcctccaccatgccgccgaagttcgaccccaacgagatcaaagtcgtatacctgaggtgcaccggaggtgaagtcggtgccacttctgccctggcccccaagatcggccccctgtgtctgtctccaaaaaaggttggtgatgacattgccaaggcaacggtgactggaagggcctgaggattacagtgaaactgaccattcagaacagacaggcccagattgaggtggtgccttctgcctctgccctgatcatcaaagccctcaaggaaccaccaagagacagaaagaaacagaaaaacattaaacacagtgggaatatcacttttgatgagatcgtcaacattgctcgacagatgcggcaccgatccttagccagagaactctctggaaccattaaagagatcctggggactgcccagtctgtgggctgtaatgttgatggccgccaccctcatgacatcatagatgacatcaacagtggtgctgtggaatgcccagccagttaagcacaaaggaaaatatttcagtaaaggatcatttgacacacacacacacacacacacacacacacacacacacacacacacacacacacaagaaacaggttaacattggatgtctctcatcatggaggaatggcctcttggaccccagtttttcataggcataagagtttatcagctgttctaaaagtacaggctttatcattatgcctctcactagcttggctggaggctgattttctttttaggcaattatgccacttgaaatatggagtttatatattggtgggagtcctggcatggaggagatattctgaactcaagtacttctcctagtactcctgattataaatgtaatacatatttgctagatccagtttgaaatagtgaaaagtaaatatcacctgtaattccatccctgataatatagtcaatcataatatacatatatccatctattgacatttttctctaattattatgattattaaattaggcttatgatgtaactgccactttaaaacctgctttactcaatttataatgtaacctgaatgtagatgagccatcctgcactcatctttaagcctgatttagtattgtattgcatctgccacacaattgcatacatgctaatacacaaacacgcttcacttcaaatacatgaaccagtgatgcaaatctttactgaacattctctggaatataaaagaacatgttttttattattattattattatactttaagttttagggtacatgtgcacattgtgcaggttacatatgtatacatatgccatgctggtgcactgcacccactaactcgtcatctagcattaggtatatctcccaatgctatccctccccccaccccacaacagtccccagagtgtgatattccccttcctgtgtccatgtgatctcattgttcagttcccatctatgagtgagaatatgcggtgtttggttttttgttcttgtgatagtttactgagaatgatgttttccaatttcatccatgtccctacaaaggacatgaactcatcattttttatggctgcatagtattccatggtgtatatgtgccacattttcttaatccagtctatcattgttggacgtttgggttggttccaagtctttgctattgtgaataatgccgcaataaacatacgtgtgcatgtgtctttatagcagcatgatttatagtcctttgggtatatacccagtaatgggatggctgggtcaaatggtatttccagttctagatccctgaggaatcgccacactgacttccacaatggttgaactagtttacagtcccaccaacagtgtaaaagtgttcctatttctccacatcctctccagcacctgttgtttcctgactttttaatgatcgccattctaactggtgtgaaatgggatctaattaaactaaagagcttctgcacagcaaaagaaactaccatcagagtgaacaggcaacctacaaaacgggagaaaattttcacaacctactcatctgacaaacggctaatatccagaatctacaatgaactcaaacaaatttacaagaaaaaaacaaacagccccatcaaaaagtgggcaaaggacatgaacagacacttctcaaaagaagacatttatgcagccaaaaaacacatgaaaaaatgcttatcatcactggccatcagagaaatgcaaatcaaaaccacaatgagataccatctcacaccagttagaatggcgatcattaaaagaacatgttttattgcatttatcacaaaacttaatggtaagcattttagatcattttttgttcctctaacaaaaagcagttactcctgataaattttttatctttgttttctccttgcctttagctcttttatttttctcttgcttctctccctttcctctaacttctttctaccttatgaatatataacagaagttacagacctccttaggtttgccaaatcctcagaattaaggaaaataactgaaaaaatgtattatataaaacatggactttaaatttatatagctttcctgtaaaactttaattattgcttttcttcctttgtgctctactctctccatcttgagttcatattatatatttcttaaaattcttgcttttcacattgaatatcatcaatttcctcatttcaatctcttcttctttgcattatgggatatctttttgagctcggttattttattttgatattaatttgtttagtatttaatcttattttcttgactccagttggctttttgaaaagaaacttttaaattttcaaatagatgcagatttgtgaaaaattagatagtacataaagtttctatgtgtcccttatctaatttctactagtattaagatcttaaattagtatcatacatttgtcataattgatgaatcaatattgatacattattattaactaaagattacagcttattgagatcctgacttgttacctaatgccccatcccaagattctatctaaaatactacatgtaaatactacaggtattcatttatctccttaagctcctcttggttgagacagtttctcagtctttctttgtttttaatgaccttgacagttttgaggtatactggtctgctatttgttagaatgtccctcaattataatttgcttgataattgttctcacgactggactagggctactggttatagagaggaagaccacaaaggtaaaacatcattctcatcacatcatctcatgggtagatactaccaacatgattcattacagttgaggttaagcttgatcaccttgctgaggtggtgtttgtcagctttcaccaccgccaagtcattctttctctccccctgttcataccttactctttgggagaaagttgctatgaacagactacactatggagtgaggaattatgctccactaccttgaaagtgaagaattataaatcatttgtaattcttctgcataggagattttaccttttctcacctgtttttatttattttattttctcccctatttatgttaaatcatttatttctgtatgaattcatggatattattttatgctttgagttataattcagtcctactttattttgttgctcaaattttttcagctttgtccattgagagtatttttagccgatctctgtgtcttcttgacagacccccacaaatgtggtttcttttcctttctgttaattttttaggcatttatttacgcattggaactacagaatgctccaggctcatcttgtgtatttcctgtctgagttctagaatcatctacttccccatgaaaccctattttttttattattgttaaagaatcatattagaaaccaaagaatggatgctaacagtctgttattactgaagtgccattgtttttagaccctctcagctaacagagcaaaaaatatgtacatgtatatgtgctaacttgtgtatatacacagacctataaacagttctatatgtaactatctatatctatattaagctaaacctaagtttatcctgatttctccaattctaatccattacttcacagatcattctagccttcttcccttacttatctgaaatctctctctccaactgtgagaaaactggtccttaacatctgctgtccatttgtataattgtccattgccaagatacctatatagcagtttcagaattgttcacctgtaaaacaacattatcaacaagagtacagtccttatgtacaggttgtttcacctttagtcttacagactctcttcttattcacactaaaactgatagtgtctatttgcagttcatttcctgtgtaatactatatgcatgtatatatatgtatacatatatactatatacacaaacatatgtatacacacacacatatatatgctcaattcaggcatggctacagatctagtagattaggtcttcttatgtgtgaactgatctttcagtggtatcaactgatgacgtgggttttcccctatatttaaatgcattgttcttttaatggatatctgcaagcatcaatgcatgtgtgcaaaaatgcatgtgtgctcacatttatgcttgcagatgttaaaaactgtggtaggtagatttcttcatggtcctttgttccttagtattactctggtgattatcttatatattatataatgaaagaaatttcaaaagtgtgattaattagtttagtttaacatatggatatttctcgatgcaggatcagtctaatcacataaatcctatatgtggttaaattagtggacgtctctcaaaagcaggtcagtgtagtggctaacagccatggtcttgagtcagctgcctgggttgaaggcccagttctgccacttaccaactttatggcctttgcaggtttaatttaacctgtgtgtaaaatgggattgataataacaccttcctcataggactgctatgaagattcaagagttagtgtatggaaagagtttataacagaggctgggaccctttagctactcactaaatattagatattattttctgtagctgacagcaaaaaagaaattcaaagagtttaaaaacattagaaggattcagtagaagggggattttccagggccaagacagaggatgccaggggacaagcactggaaagtagccactaagcactgagagtgggctgggcaccatggctcatgcttgtaatctcagtactttgggaggccgaagcaggtaaatcacaaagtcaggagttccagaccagcctggccaacatggtgaaacccccctctactaaaactacaaaaattagccaggcatggtggtgggtgcctgtaatcccaactacttgggaagctgaggcaggagaattgcttgaactcgggaggtggaagttacagtgagtcgagatctcactactgcactccagcctgggtgagagagcaagactctgtctcgaaagaaaaagaactgagaatggactgtggctaacaaccagcaaaaaatggagacctcagtcctgtgaccaaacggaactgaattctgccaataacccaactgaacttggaagcagattctcccccagagccttcagaaaagtactcaactctgctgataccttgattttggccttgggataccctaaacagagagatcctcaaggctggctagacttctgatctatagaaatgtgagataatacatgggtattgtctcaaaccactaaacttattgtaatgtttacacagcaatagaaaactaattcagatatattttttaaatcatcatttcacctagataaattttgttatctttgcatagtttaatcatgcttattctgtttagtaaactgatccttttttttattattatacttaaagttttagggtacatgtgcaccaaagtgtttttgaaaaagtgaggtcccatttcccacactaattactgggtatagttgcctagcttaactttccatcagctttccacttttcgaaactatttttgcaatagcattaattatttttgggccaaagttcactattaaatgtcattggaatgatttctggtgataagaactgacagaggtgttgcttgtttgtaaaattctcatgtcttttgaaattcaatctcacatcccgctcattctacaaccatagctttaggttttacatttttctctcagtagttaaactttcattgttcatttgagtcgcgatttgctcatttttgataagtgtgtctttgggttctgcttctggtcttgtcagttattacatacaggtgccaaaataaggggtcatgacatgcttgcctttcagtgtaacactgttttggttttattgaaccaaaggtttcctaaaaagttttatagaaggaaagtttagcagttggattgctagcacaaagagggaataaaattgtggtccatagatgtgttactcaaaaacatctcatttcaatttcgtgttcagagaatcttaaagtaaggcaagatgcaaaagatcaaaataataactttaattattgactagttgcatatcacaggtaaattatttatcctctctatgatttagtttttacatctacaaaatgacatacccattcattagtttccttgaaatctagtgctgcttaaatttttccttaaagtagtcgttcttaaagtgtgatctctggaccagcggcagccttacctgggaagttagaaatgcaagtggtcccactacagacttcataaatcagaaactctggaggtacagcctaggaatctatgcttaacaagaccttccagatgattccatgggaaagtttgacaaccactgccatagcagagactaacaatgtcttagcattgggccttgcatatgcttaatgaaaagcagttgacttaggtaatcgtgtatgaaaagaagaaggattatatgaataatagaaattagctggggatgctagcacatagctcaaaggggttctttgaaacatgtaattttgaaagctccatgagaggttgttttgcacctttccttgttttaatatagaaatacttctaaagttactttaaaaattaaaaaaatgggtttctgttttaatactaaataaaattaaggaaaatgaaagttccagggagaaacatgatgctcctacagctttgaagatcccttagcccatctctggttactctcagggtaacttgcatttgagattcatgggtctaaccagtgtggctagtggaatcctgttgggactgaccaaatctggtttctcttctgggtgcattacgttgttcatttcctatgtgtctgataggttggtttccttttagagccttcattggtcatcatgaacagtgatgtcgatgtttctgtgggattttttaggaagagctaaacattgctgcaactccccttctctgttgaagtctgcagcatcactgtggaaagcagcattctgctacactgctggccacattttctctgttgtctctgttaaatggaggggcaaagaagaccctttggtgcaaagagtctctctttcttacaaactaaaaactgatagtgcctatttgcagttcatttcctgtgtaatactacatacaaacacacacacacacacacccctatatatacatatatgtaatactatatatagaattttatatatataaaattctacatatgtagaattttatatatataaaattctacatatgtagaatttttatatatagaattttctatatctataaaatttcacattttttaatgtgtgaaaagatagaaatttatatacctatatatgtagtattccatatatgtgagtgtatatacccatgtgtatacccatgtatatataggtatttagatatatatacctacataaacatatatatgatactgtatatgttatacatatatatgtattatctctacatatacatatatagtattgtaagtattgtatatatacctacatatacacatataatactacatatatgtatatatgtaatactatatatgtatataatatttagtgctgtatatgtataggtatgtatgtatatgtaatactatatataggcatatatacatatatgtatatatgtatatgtatgtgtaaatatgtgtatatacatatatagatatatatatgtacctacatatacataatgcatacgtacaacaaaaaatgagtaaacaaatcaatataaatttaaatgtggataattcctataacaaaaaataaagtaaaataagtattaaagagagattgggtggaagggctaccatataggggctggataggaaagggccttctgttaaggtagcatttaatcaaagagctaaatgaagaacctaaacaaagcagaatttagggaaaaagttagtgtctaaatatagtctaggccaggtgtggtggctcactcctgtaatcccagcactttgggaggctgaggcgggcagatcacctgaggtcaggagtttgagaccaacctgggcaacatggcaaaaccccgtctctactaaaaatacaaaaattagccgggcgtggtggcatgtgcctgtaatcccagctacttgggaggctgagacaggagaatcccctgaacccaggaagcggagcttgcagcgagccgagattgcaccattgcactccagcctgggtgacagagtgtgactctgtctcaaaaaaaaaaaaaaaaaaataataaagcaaaaataaaataaagtctaaatgtagtgtctaaatatgtgaataaatttctattcacatattaaaaaatgtattcaataagttgtaatccaaaagtagagtctgtaaaaacaatcaaatgtggtatttcagaaaagactgaaagtagagttttagttgaaaaaaataattctattgtacttttcaaggaaagaaaagagttttcaatgaaacatactcagatattggcaatggtagcaccaagacaagaaagtttcctaaacatctacagatttaaacgattgatttgttattatagcctgtctaggcaagtagctttgctccagattttttatgggagactgaatctgcagcatagatgaccttgtttcaaggttgattatggtctcttaatgactctttaggtcttttttaaagttcccagagcttatgaatgtcattatactaggtgatgttgttagttgggaattatttggaagtactgttcatagtgcaagtcattactgaatctatcaaatgagacaggacgtgtatcttttctctctcttttttttttttttttttttttgagacggagtctcgctctgtcgcccaggctggagtgcagtggcgcaatctcggctcactgcaagctccgcctcccgggttcacgccattctcctgcctcagcctcccaagtagctgggactacaggcgcccgccactacgcccggctaattttttgtatttttagtagagacggggtttcaccgttttggccgggatggtctcgatctcctgacctcgtgatctgcccgcctcggcctcccaaagtgctgggattacaggcgtgagccaccgcgcccggccctctctttttttttttgagacggagtctcgctctgtcgcccaggctggagtgcagtggcaagatctcagttcactgcaagctccacctcccaggttcacaccattctcctgcctcagcctcctgagtagctgggactacaggcatccgccaccacgcccggctaattttttgtatttttagtagacacggggtttcgccgtgttagccagggtggcgtgtttctttattcttctcgtttttgtttttgtttttgttttttgtttttttccttgtttggctatgacttaactgtaggttgtcttgttaatgtctcgtttcagtttcagggatagttactaattgacagagataagtggggtggtaggataatggtggatataagcagttattaggtatccaagccatacttgcaaaatatactaaaatggggtggacatttctcagccatctggtgtagtgatggagttgcttgccactcctttcaggctactcagggcaagggaaacagattaaacaggttcttcttgaatagtaaaaaagtaaacatggtgagcagtgcttttaatgaagataagtctatataattatatttggaaagacccaaattataatcacaaaagatgggaatgtggcagatttcataagttctgtttccaaattctagctcaaatatttaataactttctgataatagcaaaatcacttctaatcttttagtacccacatttcttcatctgaacaatgggaacaataataataactactttgggaagtcatagtgatgattaaataagtgacaatatgcagagtatttagaataacacatcacatatgaatgttatgtaagttgaattagttatctattactgtatagcaaattatctcaaaactcagtggctttaaacaactatatatatacatacacatgattatatactacataaggatattgtgtgtgtacatatgtgtgtatatatatatgactagtcatgtacatgtatttattgtatatatatatctgatgtgtgtgtgtgtgtgtgtgtgtgtgtgtgtgtgaatctgtgattagttgactggggctgaaggattgtctttcaatagggctcacacacatgactggcaagttggtgatagcaattgtcaggaggccccttagcagttcctaataatagtccagttcagtgtatagaatctgaaggaaaccaagatgaggctggagaggtagatgtgggtcaaatccctaagagtatggtgagccatgctaaatagttcagagtcttattccaagggcaatgggaaactattgaggagattttaccttgaagatgaaggtcagatttgctttttagtaaaagtcattttggagtctactgctatgtagaacagactaaaaggcctgggcaatactgatgctttggaatggagagagaggtaagtagtaggctcaacaaacctcagtgattgatattggatgtgggcataaaccgaggaaagataatgcttcctagaattattacttggaagttaggggtataagaacgttgtgaatgaaggacaaaaacagatttgaaagtagaaaatgattttttttttttttagcttggctcttattaagtttgaggagaaatggagagaggtctaaatgataaggtagtcacttgacatgaatagtcaagtttagagacaggcatgttggctcatgcctataatcccaatatttgggaggctgaggcaggaggatcacttgaggccaggagtttgagatcagcctggtcaacatagagagaccctatctcttcacaaaagtaactaaaaatcagctaagcatggtggcacacacctgtagtcccagctactcaggagtctgaggtaggaagattacttgagccttggagttcaacattgcagtgagctgtgatcacgcactgcactccagcctgggcaacagagcaagacccttcaaaaaatatataaacaagcaaacaaacaaacaaaaaacaaacaaaaatcaagtttacaaatctatctctttaaaatttttcttttcaagagctgcctccaaagtgagctaataaaattgaatttgccaatgaaacaaagtctttgcaaaactgaaatatgaatccctttttcaccgattttggaaagtgttttgaatgtctggtgctttcatggtgtctggatcctgaagggtggaacatccatctggttcttatgtctagaggtgagtccccttgagagacctgtattaaatgaagtatgccttgccttgaatcctgcaactgccaagacaaggtcaggaaccccaccatgaggaatcaagaaggccagagcatggttggtgacttcttctgcatcagggaggtcacagaggtgtagtgagttgccgccaccatctggctgtggcctcagcaaggaggaaatgaggatctctcacagctggggcaataagacagccaagcaaatgatcttgctgtgtggacaaaatgtgtgaaagatttcaccagtgcatctctctgacagctcctggcattaaaagacacagttttctatactcagctattttaaaaaaatttttagttgttggtgttcttagttttccccaacaggacaccattcccctgctgtagaggtgaagagaagctttctctctctgttcttgagacctgagagaatttcttcctaggtgaagatttcaatggtgtagctggatggcttatcagagggcatatagaaagagccagatgccataaatctttcctggatataaataaatagaacagaataaaactagactcctaatgcatttctagggacaaacaaccaattgagcatgtatttattgacctgctatgtgctcagcaatgtcatagagactcttgacagtggtaagaggaatatatgaaaaatatatggggtgaaccaccttttttcccagctatcgatactaaatatcattaaatatgtatatatttggctctttctattactgctgctatttctacatcacagatgcttatttgttagtcactactgccattatccccactgcaattactcacagtgcttttctcatagtttttgaaaataattagtgatcattcaataaaaagcaacttttatttccaatatgatcatgacgataatgacaaatactactatacttgctttactaaggtaatgacaaatactactatacatgttgtactaattatttctactgtttatttagtattttctatatgtcagccattgtactcagcctttacatacattttcttatttaatccctgctttttttccatgtggccttggctataagaatatcctttactctctagatgagaaaattcaaccggaaaaaaagttggacattttgcccaagtagttagggaaaagagtctagtctctggaatattgaagatgctcaaaaaacaattgccaattaagttattaaccctaaagataatacttcattgtgtagtctttgagcccaaatagtagctgtttagccaaaattgttttatggacattttatatggcccacacaagttttttttaatgtaaattagggaacatcattttaaattgggagaattcatgtctctctgtctcacgcaattagaatttatagactgcttttgaaaaaaatgtaagaagtggctacttcatacaatgtcctatatcttttttccttttctaaaaatggacgcattgtgactgtacatatttatagggtacaatttgatgttctgttacatatatatgttgtataatgatcaaatcagagtattcagcatatccatcatctcatacacttatcattgctttgtgacaaagacattgaaaagcctctcttcaagctattttataatatacaataccttactgttaaccatggtcaccctactgtgcaacaaaacaccagaacttattcctcctaattataactctctacccattgaccagcctctcttcatcctctccatttgctctcctcctcagtctctggtaacaactgttttactctctgcttctaagatagtttctctttttttcctgtttttagattccacatatgagtgagatcaccttgtctcgtattttgacctggaaataatttcccgatggggagtagcagccaatgccaggtagccgcagtatttgcccagcctgctttacctgctaaaaagcctgtaatcctttcagtttgagacctccgaaaaaatgcattgaagtttcatatcatacagccccacaaatttaattagtgaatttgatgacttggaagtgtaaccgcccaagaatacagatcagggcaagatgcaatagtgttatactatggcacagacagaagcggtataaaaatttgagaactgaagtagaccaatgttctagggtaagcagggatgatttcatgggagcagttgaacttcagccatgattgaatgatgggcaccctttgtaaaagtagagaggagaaaaaacacaatcgtttttgcatgatacccacaaataataaaggacatcacgaatctgtgtctccttaagttttagaaacaacagcttctagcaagagcactgaaattgggattcgtattcaccagaatcatactgagttttgaaattcccaaaatggcctgagaataggtaagtgaagttaagtaagacctaaggtcctggaaatgccctgagaactaattggcactacagagattcatgagagaatccttgtggtaccactttctgcctcacagaactgacttcacttgctgggccacatccccctcttttcttctgccttctggttcctaatgcttccagaaggagagacactgggaagcccaaggattgtaccaattataatcagctccatcagtgtcacagggcaggcacaaaacctcccagttcttccagacagaaacctctctggctcttgctgtcaaggccaaagttgcctaccctcaaattcccaaagtcacagaaatcctaactttccaatctctctagcaatgtggttgctgaccttagagctaccaataccaagtctattgtcttaggtttgtttctaccagaaagaggattttccatctttctgatatcccaatgcaatggaagcaaatagagggtgctgagttaaatatttttttttggcatcaaatagatagtatttgattcctttgcatactcttgggctcatttcctaatcatctaattcctggtatattattcagttttcacactgccttaaagaacttccctgagactaagtaatttgtaaaggaaagaggttttattggctcacagttctacatggctggggaggcctcaggaaacttaccatcatggtggaaggcaaaagggaagcaagcaccgtcttcacaaggcagcaggagagagaagcaagcaagagtagggaaaaactgccttataaaaccatcagatctcatgagaactcactatcatgagaacagtatgagggaaaccttccccatgatccaatcacccccctctctgggcatgtgaggattacaggtctctcccgcaacacatggggatcacaatgtgagatgaaatttgagtggtaatacagagccaaaccatatcacttagtttccttgtctgtaaaatgttgaaaatagttgttatgagaattaaatcagatctgtcatgtaaagcattcagagcagtagctagcacatattgagcgctcaaaattcattatttcatgaatattgttattgatgttattattgccataaggaggtaatacgaggcaagaaaaaaagaagtaatatgagaattccagcagaacttggcaaattagtgtacattccagtggataatcacaattcagaggtacaggtgagaggtccaaagaaacttcaatgtcataagcaagggaggaagttgtatctgtgtctcttagagaaatgtgagaggcaacattccattctgtgttttagcaagtcacaggtaaaaatgctagtgacaagtgcaaatggtttgctcagcacctggaaagcgcatggtgtgaacttgttccacagctaggtgcaggcacctcagggtgagccgaggtgtgaatgaaacaagagacccattaattcagtggcagctggagcaatggaaggctaattgcatttctaaagaagtggtaatctgaccactttctttctgcttgtccacgtttatagcatcaagctgctttgcatgcaccccaaaggctcctggtggcaggcaggactctaagtcatccagcttcacatgacacttctctcagcctggtgatcatttccaagaccatgcctcattaaatcagccggccagtgcttggatgcttcaaatttatggtagagtcatgacaccaaaatgcttggggctgtccatcaaaacaggcttcattaacaaatactgaaaatgaaagaattcttcctaggctctactcctcgacaatcagatgatgactgggggtcaccacagatccttgaacagtttgcatgatttgcaatcctgtcaagtgatctattttgaatgactgttgtaggagagagggagaagtggagaggcaagaagaagaggttcagatttttcttttcttggctttattttacagaatcaaaccgtccctcttcctgtttttgacagtctgcagtggcagaaatcatcacgttatggtatcaaaagcaagtagttttccttgtcctaccacaataataagtttaggctgcatcattgtaaatcattaaacttccaagatggatagatatttagcaatcaaatgatctctcctcttattttactaatgaagaaacaggggcccaggaagtttaggtgagatatgtgaagccacagggtcctgttgacatgtacggtttctacctcatctctaatatggcaatagcacctccattttcctttaagtaaatagcctttttaattctcagtgcatatggctcaggcaaggcccacctgagtttgcctgggacctgccatcaagctccaagttccaatagttggcagggaacccaggtttggtcaattaagtgattgaattaggttcattctagtggccctagctaggccaatgacatgatgttcctggaattgacctagaactattaataaagggaagctctctttcccattagggttgctgagctggttgggtgtagtcttggaactaccagagactatatgctaagaaaccacctactactgaagccagcatagcaatcaatggcaagaagaaacaaagaaatactcatttttcatgataatattaaggctctgggtcaaattttaggaattttcagtagcctgaaatagtactattactgattaatcgattgatttttaatttaagccattttgagttaggtttcttcatttataaaccaaaaaatttctgactacattagagctatctagatcacaggtcattctgaggtctggaccagagacctctctactttctcattaagagcaagggtaagaataaacaacaagagttaccaaagaatattaataagttcagctataattgcgaccaaaagattgaacttgcagaatcttaagcagagatgtccctgctaggcttagaggccttggagaagaccagctagcagcaacattgtgcttaattgtaatccccaaccaaaaatgatgaggtgtgtcacattcattttccctttgcaacttggccccttcctcactaatgtgaccttgaacactttttgtcttatctcttgttctggatagctatttccatatagcaaaccaccaccaaaaataaaagtgacctaaaaccatgacaacaatttattttgcttacagttttgagggttaattgagctcaggtagtgtgggtgctctcaagtgcctacagtcagatgttggctgggtctgaggtcatctcaaaagcttttcactaaactatttagtaccatggctggaaataattaaaaagctgaggtagaagagctgaggcttctttagcatctccttctcctctctgtgatctctccaagtgagacctacgtatggtggtccaaggattcttaggcttcttacatgacaactgaaggcacgcagatcaggtgttatgagaataatcagcagaagctgtgtggccttttctaacatagagtcagaagtcattcagcatcatgtctgccatgtttcgttcatcacgatagtcacaaggactcaataggttcaaaagtagggacaaagacatcccttttgttgggccaagtgttaacacgttttcagacatgcttttcctaaaatttttattttaaaagaaatatagacctaggaagttacaaaaatagtacatagtcctatgtatcctttaccctgtcaccccagttatggcatcttatagaaccactgtgcaatatcaaaacaaggaatttggtatttgtatattattgttaccaagactttttatttgtatattattgttaccagatcttttcaatttttaccatttctctaaacctgcattcatttggtgtgtgtgtgtgtgtgtgtgtgtgtgtgtgtgtgtttctatgcaatttttttttttttttgagatggaatgttgctcagtcgcctaggctagagtgcagtggcgttatcttggctcactgcaacctctacctcagctatattctcctgcctcagcttcccaagtagctgggactacagatgcatgccatcatgtctggctaatttttgtatttttagtagagacaaggtttcgtcatgttggccagtctggtgtcgaactcctgacctcaggtgatcctcctgcctcggcctcccaaagtactgggattacaggcaccagcctgcaattttatctcatgtatagatttgtataaccactactacaatcaatatactgaactgttctgtcaaccactaattaactccctcatgctacctctttgtatttgcacccaccccattttactctcctgttctccatcccctagcagatattatgttatccatctctatagttttgttaagaatattttacatcttatcatacagtacataacctcaagattaatttttttcagtaagtacgatgccattgaagtccaaaaaggtcattgcgtatctcaatagctcgttcgttcttatagctgagccttattacattttacaaatgtatctacaacctatttacatcattacatttgaaatgacttcctgtagatagcatatatttgggtcacatttttgtttttatttgttatttaattcacagtgacaacctctgtcttttaattggtatatttattccatttacatttaaagtaagtatagacattctagggcttaagtttaccatatatgattcattttcagtttgttctcttttttactgatatttccattttctgtctgacttacgtgttacttgaacatgttttagaattccattttcaatggtctcttattttttaaaaaataacatttttgacgaggtgcggtcaatacacctgtattcccagcactttgggaggcctaggagggcagatcatttgaggtcaggagttcgagaccttcctggccaacatggtgaagccccatctttactaaaaatacaaaaataagctgggtgtggtggcagaagtctgtaatcccagctactctggaggctgaggcatgagaatcgctcgaacctgggaggcagagattgcagtgagccaagatggcaccattgcactccagcctgggcaatagagtgagactcagtctcaaaaaaatatacatatatcatttttgtatagtttttgtagtggttacttacatttgtttctgaatctatcaaatttcttacagactttggctaagtcccctaatacttaaattgtccttgctacccattttcagtgggtctgtgccaaagactagagtctataatacaacctatttaattctacctggccatgtgcgaagccaaaaagggatcaccctgcaggtacatcattttacctacgtcttgaactctgactttaaaacccaaactctaatagtagtaagtagctctatggcccaaagttatgaaggtggtagttaatacctgggggtaactcagtattatacttggaaaggcaggaatcaggtgaccatgttcttctctacagcttgataaatacaaagggtactgtaaagtaatggatgtattttggtcaaagataggcagaggtaggatgtttacatccagagtgactcagcgaatttagagtgcaggcacatagctccacttgttatcacagccatgtagccataacatgggaaggctcatcatttggctctaagccactatcgtctgtaaaacgtatatttgccctgctgatacagtacaggcacacttgtgtccagagagagagagagtcagagctgtccatctttgcagatggacagggtgagccaggacacagctgggctcgcttgtgtccagagaaagagttaaactgctgaccctgaatgcaagggagagccggccatgtgtgtgggagccgccggactaagcagccgagacagggcagacagtgtgagagaactggtgcgagggagctactgatgagagtggtgccgaacaaaactacatatcccctgtctacggccccccgagtgttctttcagttacctgctcatccacccactcccttcagacctcagcatgagctggaatgtgaccctgggcgtgacaattggcgcagtcgtgaacctgacaagtatataagcatgacgcatcaagatgcaaattcaagtttagtaaatatatgctgcatggccactgtgtaccaggctctggattttcacttaaatgatcacttttcatctcctcagcagcaacaagatctatcataacatgaattgacacaacagggttttaatagcaaaccaaagtggagcaaaacataatagcagacaggaacccaatggaaacaaccccataccagatttgccactatgggctttgagaacacccaaactgtatacagctctgttattcttgttgcttacttttctcaaatgtcaatgaacataatgaatgaaataattatgtatgtatacacccacacgggcacacacacacacacacacacacacacagagtccttaagtggtcgcttaaagtattgtttatattttgaatatatgaactttccaacatatacgaaggtagagagaatattataatgaactccttcatatccattacccagtttcaataattatccacatcaatattttttcaatcttggtttacctactttctacactgttaccttttgctgtgttactttaagtcaaatcccagatgtcatgttattttgtgtatacaccctctagtatgcatctctagctgataaaaggactttctcttcctctataactaccattcccatattacctctgacaacatttataatcattccttaataccatctaatattaagagggttgaaaagtgattctgattatatgtgatttcatcttatcttagctaatcattttacctaaaatccaggtgtgtaagagattatcacaatatagtaaggaaaataagagtaatatgaatgaaagtactagagaaaaagaaagtacccatagagagctacatgtgaggctgtctgcgagagactagaggtatctgaatcattctaagcattctcagcagtgaaaatcctgagtgagctgccttggtgggcacagaagtgttctctgtcctgtcaagctgccacatacagcttttgttgtgaacgcttcctgatagcaggcacagtgatgatcacatccacaatggaattctagaaataatgccttctttttctctgggagaatgatggtgctttacagatgaaacaagatgcctgccaaatgaaataggatttttgcctctaattgtaacagcttaataacataagggatagtccacaaaactttttaaaattctgggctgatgcaaacttgctgctggatctctgccagctcattgcacctgcagcatttccccactaatatttcaaagtgtcagcttaagtggcctgagagctgcctgcagaactatggtaaattgctgagatatgcctagaccagctgagataatagggcgccaagaagcaggggaaaatgtcaacagctggggttcatgcgactaattttgttttctttaaacttcatggaatgacaaatcccactaagagctaatctggaattatacaatcaccagattcttcatgtatttttaaatccatgcagtcagtcaataaatatatagtaaacacgtatcaaaggcacggacgcttttgcctcttgagcctgtgatgggcatcaaacatgcagccctctctcgggctgaatctgaccatgacccctgcatacttcttaccatcaagctccaggcagcagcaggagcataattattaacataggatacaaaatctgtttcctttttcaagcatattctcaacctctctgagaaagcgtaacaacgggctgactgctctatgtgactatactgtctcattgtaaacaaactaacaatggtgcgaagttctgaacagggcagagaccacacttgtctatatttttagaaccacgcatcatgttaggaacaaggaagctgctcaaaaatatttatttaaggatgcgatgggtaattgaacaaaagaagcatcacatatgtgctatctgaatccagtaatctagattgatagaagtctatggaaaataagaataacactagcaatggtaacataaaataattaaaatggaagctgatccttattgaatgatatctttatctcaggcattgtgcgtaagtatattcatggacaatctctcatttattgctcacagccttcagcgatagattctgttattggcttcatgtttccaagggggaacctgaggcttagagaagttaaacaagtggcccaaagagcagctagcagtctgagtccactgcctacattcttatcccatccactgcggcatgctgactctttggtataaaaaggctgtccaattttaggtgatcattgttgtctctaggtatctttgtacaatatatcttacatggtcatttcctcctggaattaagagcatgctatacaatttttctactattattattttaatttaatttttttgagacagggcctcactctgtcctccaggctagaatgcagtggtgtgaacatggctcactgcagcctcgacctcaagcaatcctcccacctcagcctcccaagtggctgggaatacacatgcatgtcaccacgcctggctaatttaaaaaaaaaaaattatagagacagggtcttgccgtgttgcccaggctagtctcaatctcctgggctcaagcaattctgcctcaggctcctaaagtgctaggattataggcatgtttcaccatgcctagcctcagtacttgtatttatgattcagggtttgggtgaaaattaaaggacttctatagaaaagatagcagatgtgtcctgggaagaaactttagaaaaaccagaattggctggcaatgaaaaagagaacactctggcaggtggtatcccttgtgggtatttcaggtgctaaggcatgggtagagtggtgagaaagtgataaaatgcatgtgaccagaaaaacagatgtgcagagaagcatggattagagctttaaggaagctagtttcataaataacttggtaaatatcagcagagcttcattttatggctatttctgtgttttacttgaattgctaattacccacagaaatacagttcaggagtggggttcttgaaaatttacatttaatatgatcctggtacttcagatattttattaagtataattgaaaagggttaacactagcagttttcttctatctgttctgtatttgaaaatatacccactcatacattttatacacacacgttatatatgcatgtacacttgtgtatgtttatacatatacattatataatgtttgtatatataaagtacatatattgtagaaataaaaaatacattccttttggctgtatctggctacaatgacaaaaggagaaccttttaaattctgttaatatgtttgaatttaagacagtaggagatattaaatgacttctgttataaaaataaagtaacaagcaaacatcacccactgaagagaaaagcatctgtttaaatgatgccttattatggaaaagagtaaggttatttattatacttttgatgaatattttcattgtttttagttattagctattatgaatgatgttaatatgaacactaaattacaaataatgctgctatagctatgtgcaccaagtgtacgttccacatatgtatactagatatacacctatgagtatcattgcttaatcatatggcattgcattagttttgtattcttgcatagaaaatgaccccaaatacttagaggcttaaaacaactaacacttattgtcacagtttctttgcatcaggaatctgtgtgcaccttagctgggttgctctagctcaggctttctcacaaagctgcagtcaggatgttggttgaaggtgctgtctcatatgaaggctggacggaagaagaatctgcttccaagcttgtacacatagctgttggcaggttgttggaccaaggaacttagttcctctctggacgtaggatggaaatctccctcaattccttgccatattgccttccctttagggtagctcaggacatggcagctggatttctgaagacaccaagagagtaagaaagatgaatgacaaagtctttttaaaaaaatatttaacctttttaattttgagatcattaattgcagattcattcacatgtagttgtaagagagatcctgtgtagcttttacccagtttcccccagtggtaacatcttccacaactatagtaaaatatcaaaccaggatattgacactgatacagtccagatacagaatatttccatcaccagaaagatgcttcatgttgtccttgatatcttcggatacatttacttcctaccaacttctcctccttaatccttggcaactactactctcttttctatttctatagttttgtcatttcagcaaagctatgtaagaagaattgtgtagtatacaaccttttggcattggttttttcattcggctaattctctggatattcattcagttgttccatgaattaacagcttcgttctttttcctgctgactagacttatctggagtggatgtactacactctacttacccattcagccactgagggacatctggctttggagaggccagtggccacttaatgatatccatgtcctaatccctagaatctgagtacattacctggcaaaagggacactgcagatatgattaaatatcttgagatggggataacatcctggattatttgggtgggataaatataatccaaagatcttcctaagagagaagcaggaagcccagagtcagaaaaaaaaaaaaaaaagatttcacaaaggaagcagaggaagaagagatgggaccacgaattcaatggttgcagcaatgtggccaagaggccaaaaaaattcaggtatcatcagaaacgggaaaaggccaggaagcatttcattctcccctagagtctccagaatgaatgtccacctgctgacaacttgattttaggacttctcacgtccaaaactgtataataataagtttgtgttattttaagccatgaagtgtgtaataattagctacagcagcaatagaaagctaatgtaggtttgtttccaatttttggtgattacaaacaaagatgctataaacattcatatcctggtttttgtgagaatatgactgtattagtcagggtcctctagagggacagaacgaataggatatatgtatatatgaaaggaagtttactaaggataattgactcacaccatcacaaggtaaaagtcccacaatagggccatctgcaaattgaggatcaaggaagccagtggtggctcagtccaagccccaaaacctcaaaagtagggaagccgacagtgtacccttcagtctgtgaccaaagtcctgagagcccctggcaaaccactggggtgagtccaagagtccaaaggccgaagaacctggagtctggtgttcaagggcaggaagaatccagcactggagaacgacgaaggcagaaagactcagcaagccagctcatcccaccttcctctgcctgctttttctagccgcactggcagccaattacatggtgcccaactggattgagggtgagtctgcctctcccagtccacagactcaaatgttaatctcctctggcaataccatcacagacacacccagaaataatactttgcatccttcaatccaatcaagttcacagtccacattaaccatcacaatgacttttatttctctggaataaaagccaagaggtgcaattgccagtttatatgttagttacacatttagtttattaaagacacccctggactcttttccagagtgggtacaccacttgaacccaccaagattatatgaattatacagtttattgacatcctttttcacctttgacattgttactatttttttttttattttagccatcctgtagatgtgcagtggtatctcattgtagttttaatttgcatttctctgatgaataatgatgttgaacatctttttgagggtttttgttatctatagagcatctatgaggaaatgtccctttatgtcttttgcccattttctttttgaattgttttctacttttgagttttgagaattccttttatacagctattcaaattgttttgcccctgtataagcaaggtttttttttttttgttaatttcttattgctttcaaacttttttcttcagttttctaatgttagattataatgtgtctttgtatggatttctccaggtttattttgagtttgttcagcttccggtatctctaggttaatgtcttttgccaaatttggggagttttcagccatcaagattctgatgaatcttgatgctttgagtctttctccagccctgccctctttctagtttccttctgagactccattgtcacaaatatttgatcttttgttacagttcgtttggtcccttgtgctccttcttttcttttttctcttttcttttttctatgcttttctttcttttattttttctctttctttctttctttcttttctttctttctttctttctgcatattttctctttttgttcagcttggttaatttctgttgcccattcagttttttaaattggttgttgcatttttcaagttctaaaatttccatttagttctgctttgtatcttctatttctttgctgtgtcaatgaaaacagtaaaatatttgaagagattcattctgagccaaatatgagtgaccatggcccatgacgcagccctcaggaagtcctaagaacatgtgcccaaagtatttggggtgcagcttggttttatacattgatacattttagggacgcatgagacagcaatgaaatacagttaagaaatacattggtttggtccagaaaggcgggacaactcaaagcaagggcttccaggctataggtaaatttaaacactttctagttgacaattggttgagtttatctaaagacctgggatcacagaaaggaaatgttcagtttaagataaaagattgtggagaccaaggttcttttgaggtgttatagtggctgcccttagagacagtagatgacaaatgtttcctattcagatctttaaaaggtgctagactcttggttaatctctttaggattgggagagcctggaagaaaaggatctagctatgttaatagagattcttcacagatgtaaatttcccctgacaatggacagctttgcatagccatttcaagatatggcaaagaaacattttttggggtaaaatattttgactttcttctttgtcacataatgttattccagagtcagattggaaagtaagtcagatacatagggttaaataaaacccatctaatgagaatttaatgatttgtagggcatgactccccagactccttaaataggaatttgggcaagataaaaaaaaattagagtttagtcctcagctggaacatactaatttttatttcagtaatatttgcaatttctttttaaagtatttttatgatggctgttttagaagccttgtcagagaattctaacataattgtcatcttggtgttagcatcttctagttatcttttgcttgagatcttactgttttgttttttttgttttttttggaaattaaacatcctgttcctaaacaacaaatgggtcaatgaagaaattaaacaggtaatctaaaaattcttttgtctgggcatggtggctcatgcctgtaatcccagcactttgggaggctgaggcaggcggatcacgaagttaggaggttgagaccatcctggctaacatggtgaaaccctgtctgtaccaaaaatacaaaaaattagccaggcttggtggtgggcacctgtagtcccagctacttgggaggctggggcaggagaatggtgtgaacccgggaggcagagtttgcagtgagccaagattgtgccactgcactccagcctgggtgacagagcgagactccatctcaaaaaaaaaaaaaaattatttgagaccaatgaaattggaagcacagaatactaaaacctatgggctacagcaaaagcagttctaagagggaagttgttagtgttatagcctcgccaatctaccacgatgtagcagtatctcattgcctgatgttctttgtctcaccaccaagaaagttaaggagcatggacatcaagggtgaggttggagggaaagtttaataagtgaaagaagaaggctcttcactgcacagaggggacccagaagagggtttccattttcacagttgaatgcaaaagcttttataagaaaccaatgagggctgggtgtctcatttgcataaggcatgcatttctggtagcttcaccctgtcctcctaatgtgcatgtggacccttagcttgatttactccatatttctttattacccttactgaacatgtgtagggggaagaattttccatcctgggcacttcccggaaagtcacctctataatctttcttatctgtgtggctgtgggcgtgtctttggcaagccccactgtgagagttcccttatctatgcctgcaggctgttcttttatttgaaagaattcagctgaggacccaccctaactgcctgggttttttcctttcttctctctcaatagcaataaatcccaacatcaaaaaggtagaaacacttcaaataaacaacctaacaatgcacctcagggaattaaaaaagaaagaacaaaccaaaccaaaaaatagtagaaggaaagaataaatatcagagaaaaataaatgaaatagagattaaaagaaacagcaatatgaaagatcaatgacacaaaaagttgattttttgaaaaagtagacattatatactttaaatattgttatgagtctctggatcttacgtaggccttgtgttttatgtggcttcttctgacactgttttaccaggggaaggggtggggtgtagggtgtattctgctaccaccatgttggatacaagttcatgttcccccagtggtcttcgttgacatctgaggggagctcctcattgctgctaggtaaggatggggattatgacttcccagtaatttccacaatccttggttggctgggagatataagatatatcccctatatttctcccatacctctggacagtggtgaaaatcctgactcttctctaggccttgtctaatgccacccacataaagagaggtaaggagtctcgttacggccagatgggagtggatgtccaggcggtctacatggtctccactgacactgcagtgtggagccttgctaccagccaataggaatgcaagtcctggccctgtacgtggccttctctgccaccactccaatggggagttagggctgacttcttatagcgtgtgaactgtagaagtctaatattttgctggtggggtggagatgggccactgtattttttttctgtgatgcttggctgcagtagagtggatagtatctaaaagttgtctgtctgtcttgctaggctgcccttattcttttcatttgtctagggaaagcaaggttttgtcagggcttcattgtgtctgtgcctattggcatttctaggttgctggttcttcagcctcaagcatgggatacatgaagcaaaaggaacacccagagaattaattaccatgtttttctgtgggtacccaggtcactagcaggtctgccttctctctgcctttcagggtcttcttaggtttattttgtaaacagtaccctaggtttttagtttcacttagtggaacatataggggaaaaaacatctattccatcttcccagaaggagaagtcccagaatatttttgtaacctaatattggaaatgacattcatcacttttgctccattctgttatttggaagtaagtcacgggctacagcttacactcaagggatagtttaccacaagtatataggggcacaagttccagaaggtgagggtcattgagcagtctcagaggttgcctgttgcaggtttgcatgtgttcagctgagtggatattgtgtgtaatttcctcaaagtttgtgctaatttctattaattagctggagaataaaagattgaagctggccaggatttatattaattagccagacaataaaagtttgaagctgtccaggattggttcttgaggtttcaggaaagaagccatctccaaaacatgatagtgcaaggtgatgcagcaagtattgacggagaagctgcagcaagttattcagaagctctagctaagatcattaatgaaggtggcaacactaaacagcagattttccatgtaaatcaaacaaccttatagtggaagaagatgccactgagaactcattacagaactattgtgttcctttgaaggtgtcagtgtttccatgcttttccatgttccctgtgtccttgcattggtatctgcacatctggtgtaactggtatgatttggctgcatccccagccaaatctcatcttgaactgtagctcccataatccccacatgttgtgggaaggacctggtgggaggtaactgaatcatgagggcagattttcccgttttgttctcgtgatagagaataagtctcacaagatctgatggttttacaaagggcagttcccctgcacatgctctcttgcctgctgccatgtaagacctgcttttgctcctccttcaccttccaccatgattgtgaggcctccctagccaagtggagttgcaagtccattaatctctttttctttataaattcctaagtctcagggtatttttacatagcagtatgaaaatggactaatatgctgtcacttctttcaatttgatattatagcttccatggggaaagtctctcttttggatgaacctataatgttgatttggtaaggtgctttgctttggtactggttgggccccacagtatagtctccttatgattactttggttgtactcattgttaacagtgtctgcaagttccttagtagcttaggcttctattgtttatggaggccgtggtgagtcttttcaggggacagggttgcagagcaggccagttttcagtccccaggtagggagtttgggtacaggtggtagtggtggtggtggtggtggtggttgcaggccaggtgttacagtcctggggtccctggaaggcagcatgcatgggctccagcagtgtccttggtggagcaggcaggctggctccctggtccctggctgtaggtaacgagtgagtagtggcccagctgctggaggtgatggggtagctgctgtagtggtaacagtggatgggctgctctcaggctggggagcacacactttgttccctgtgtcctgggggcacctccctgatatgctaaaccacttgcttactggcacataggcaacagcatgggctctgctgccaatatctggacagtaccactgggtccagccagcggcgctctgcagccctaagagtggaggtagagagtgttgtgaggccccagggatgtggaaagcaggggcttttgggccccaaggcaggatgtagttcactgttggatctgctgtcaaaataacgctgtgttgctctctctggagcaatgcagtcacgtggactcccgacatcccactatactgggctcagggtccctggcacccagggaatttcctgcagctaggactgtgggaatctgcagcaggaatgtgcactgctgaggatctttcacttacccctcccatgaaatagggagcctcttccttcccaaatcaatctggtcagctgcctcactgggtctgaaagccacagaaatgtcccttacctactggattccagcattctctcgaaatgtcctactggatgtacctttgtctacttactgttttagtctctctttgtgcaggagtcaagcactgagagcctctgtttcaccatcttgatgatgtcttgcaatttagcaattttattgatcttttcaaggaaacagtttttgtttctgttaatattctctattggtttcctattttctatttcatcactttctgctccaatttttgttatttattttcttctgtttgctttaggtttatattactcttctttctctactatccttagacggaagcctagattattgattttagacctttctttttttcaatatatgcattcaagataaatgaatttccacctaaatttccacctaagcactgcccccccttttttttttttttttttgtatgacactcactcgggtaagttgtatttttattttcatttagttcaacatatatatttcccttgagacccttctttgacccatgtgttgtttagtagttacttattctccaactatttgcagttttccagctatctttttgttgatacataatttaattccattgttgtcttagggtatgtttggtatgatttccattaaagaaaattgttttgatgtggctcatggccttgaatgtgatctgttttggtgaagccttccagttcgttggagaagaatgtgtattctgctgtagttggaagaagttatccataaacgccaatttgattcagttgttgttgatgctgctcagttcaactatgcccgtactgattttctacctgacctgtccattactgatgggggatgttgaagtctccaaccataatagtagaagttatcagtttctcctagcatctctatcagggcttatctcacatactttgatgttctgttgttagggacatgtacatgaaagattattatatcttggaaaattaactactttattattatctaatgcccctcattattcctgataattttcctggctctgaattctgctttgtccaaaatcaatatagctaccccaactttcttttgattagtgttaacatggtgtgcctctcttcagttctttatttttaatttctatacatctttccagttagagtgggtttcttgtagacaacatagagttgggtcttgttatctatccattctgagagtcttcatttggtatatttagaccatcttcattttaagtgattactgatgtagttgaactaatatctgccatgtttgcaaatgttttctatttgtttattttattttatttatgtgtttttttgagatagagtctcactttgtcgccaggctggagtgcagtgtcgcaatctctgctcactgcaacctctgcatcccgggttcaagagattctcctgcctcagcctcccaaatagctgggactacaggcatgtgccacctgctcagctaatttttatatttttagtggagacaaggttttaccatgttggtcaggatggtcttgatcttttgacctcgtgatccactagcctcagcctcccaaagtgctgggattagagtcgtgagccgccgcacctggcctatttttgctttttttaaaatcttcccctttttttctgccttctccagttttaatgaaacattttacatgattccattttatcttctctgttcgtatattaattatcctcttaaaaaattagtagtttccttacagtttagaacatttgtttataacttatctaagtcaattttcaaataacattgttttgcttcatgggtaagctgtaatcacctacttcattgctgctgttattactttgaatggttatctattaaatcaattaagaataagaaaaataaagactttattttaccttaatttctgtcttttttaatattcttactttttgttgatttaagtttctgacctatataatttttcttcttcctgaaaaacttcttttaacatttttttgaaagatagatctagttgtcacaaattctccgtttttgctcttctgagaaaatatttctctttcacttttgaagggtaatttcactagatacggtattctgagttggtgtttttcttttcttttctttctttcaatacttttaatattttatgccactctcctctttggtttctgatgagaagtctaatgtgtgttgcatccttgttcctctatagataaggtaatttttttttttctctgacttcttttgaagaatgttctgtctttggctttctgaagtttgaatatgatatgcccaggtctacctatttggtattcatccttcttgacgctccctagctaaatggaaatgtgatttgttatctgtcattaattttggaaaatcctagccatttctatgtatatatgcatatacacatatctataacggtatatacatatactattaaatatttcatctctttctctctttcttgtctttctagtattctcattacacttaagttacctcttttgtaattgatccacattattggatatgctgtttcagtttttgttgtttattttcatttttgtgctatctttgtttttcagtttagctagtttctactgaaatatcttcaagttcattgtagtcttggatgtgtcaagtgtagagaagagcctatcaaagccattattcatttctgttatggtgtttctgatttttatcatgaaaaggatttcattattttctcagtttccatctctgtttatattaccatctgttcttgcatttcgtctgctttttccatagttattttaaactctgtatccaataaaatttcaaaatctgtgtcatatatgaaattggttttgatgcttccatggtcttttcagattctgggcttttttttttttcttttaaaatgccttgccctttcgtttgtttgtttttcatggcgaaagcttgataatgcacctagcaataagatatgaaataatcagtatttttttttttttttttttttttttttgagacagagtgtcgctctgtcgcccaggctggagtgcagtggcgcgatctcggctcactgcaagctccgcctcccaggttcacgccattcccctgcctcagcctcccaagtagctgggactacaggcgcccgccactacgcccggctaattttttgtatttttagtagagacggggtttcaccgttttagccgggatggtctcgatctcctgacctcgtgatccgcccgcctcggcctcccaaagtgctgggattacaggcgtgagccaccgcgcccggcctgaaataatcagtattttagtgtaaggctttatgttaatctggccaggagctgatgtttttgctgactgtaagtgccatggtcttccatttcctccaatttcctaattattttcccttttctgttgttttttgatttccgcaagaacaccgtcttaaattgagtctttgtcttgatactctttcagctgcagaacactattatgatgctgaagacctattgatgtggtggtgagatgttgggaaaggaagcattctatgttaagaataaatcttttattttttagtaggcctgaatcactaggctgtgatattctaaagtattttgtagccttttaaaattctcgcctttcatgacatagggaggtgaaaatggcctagagttattggtccttcccttaattcagatgatagtctggaaatgcagtttttcttgagggaaggccttcatgtggtgctctgggagtatttcaaaatggtgacattcccctctgtctgaagcatgacaaagatttttgtaatcttcacctatgaacagggttcttaaagttaaaacatgaaaggtggaggccctagtaagactggtctctgaagacttaataattctcaagctgatccacattcaatctccatcagtttgtcaattgtctttgaagtgttcctgccaattactgtatctgtagctctgctcctattaagttgttggtctctgtattcacctgtctctgcaagtttttgggtggcagtttgtcttgtgatctcaaatatttgatatagtaagaaaagttgttgattttcagttttttcagcaatttttttttattgtaaggagaatggaagtgataacttgcaagttcttttttgttgttgttggaactgaaactgtagttgctttttcattctcttacatatgtctctgataaacagatgcttctgattttaatgtaatttagtccatcaacctttttccttgtgggtagtacttttgtcggttctgtttaatttcatgaagatattatgccctgttctattttatagcaaacctcttgattttacctttcatattcatatctataattctcttcaaataacatctgtaaatggaataaggtagggatggaagatatacttttatttctatacagatgtccaatgtcccatcttgatttattggaaaaaaaaagactgtccactctactctgctttgttacttttgtccttacatctgtgtgtttgtttatggactctctattcccttgttctgtttgtctacttttgagttgatagcatgttttcaataactagctttagagtaagtccataaatatgacagtataaattctctatctttgttatcctttccaggattatcttgagtattttagatcctttggatatctccatagattgtacaattagcttgtaaatttatccaaaagatacctgctcaaattttgattggaattgggagaacattatatagaaatcctactctacattcttaaggattagcaaggacattgcactatgcaaaggtgaaattcaaactgtttaaatttccagggtttttatgttttgaggtcttacatttacgtctttaatccatattgaattaatttttgtatacgacataaggaaggggtcatcaaagatctaaagacagaataccatttgacccagcaattccattactgggtgtatactcaaaggtatataaatcattctatgataaaaacacatgcataaatatgttcattgcaacagtattcataatagtaaagacatggaatcaacctaaatgcctctcagtgatagactgaataaacaaaatatgatacatatacatcatggaatactatgcagccataaaaaagaatgagatcatgtcctttgcagggacatggatggagctggaggctactattcttagtaaactaacacaggaacagaaaaccatatactgcatgttctcacttacaagtgggagctaaatgatgagaacacatggacacatagaggagaacaacacgcactggggcctatcagagggtagaggatggaagcagggagaggatcaggaaaaacaaccaatgggtactatgcttaatacctggatgataaaataatctgtataacaaacccccatgacacacatttacctgtggaacagacctgcacatcttgcacatgtacttctgaacttaaaataaatgtttaaaaattgttaaatttaaaccatccattcatacataaaatgctgtgttagatattacagaaatcaaaccaatagagtacaaggtaaacttaagaaactaaaagacaaaagggtaaaacatagtaaggtaaaaaaattagatgtgtgaggatggatccaagagttaaaaaaatacatagaaatttctgatcgaaaatctgagctgattgaaaagtattatggaataaaagaaacagaggaagacaggctttttgaaaccacttgagaaactaagtagaaaatatataaccctataagggatttagaaaaatgaaatagggttacttttgtgaaataataccaaattctaccccatcctttgtaagaatccatggaatatcttttaaaacactcatagattcaaagcaaatttcaagagatccccaacaatcagcatcctataggctacctttactagtcacaatccagtataacttaagtaaaaaccacatacatatatatatgtatatacatatatgtacatatgtgtatgtatgtgtatatatatatacacaaaatatataaccataaagaaaaaaattattctcaacaatttttgggttgaagaataaagaagtaatgtcataatcaactataggaagataataatgagaataatatatattaaaatatttaaaggagtaaaaactgtgatcctagaaaaatttataaccttaaacatttgtattactatgcaagtaaaagatacaataaataagttaacaacaaagagaccaagaaaaaaacagaaagaagtaatggtgaaatataaaattagacagcagtactgggatacttgtgttaaaaattattgaatacattataaaaagagatgaaagcaaagaaaaatgattaggtgtacaaaaatagataaaataacttttaaataggttataaaacaatttaatacagtataaaaatcatgattacctataaatctctatataaagaaatgtaagattatccatataaagatttttcttaaatgatttctctctagaactaaaataaatgacttaaagcattagaacacttaatgaacatttataaaatatattaaagttatcatacttcaaccattctgcagaatcacatgatttgggttgcattttaaaattttttatcacataatttatataatattccctaaatcatagataagagagaaaatatttgttttggaaattaatcaggttagtaagtcactccaacttaagtgtactatgatgtctcagacaaaatattatctatgaaatattaaaaatgtttaattataaacttggaaggtagagtatagaaggtgatattcagaatagggtatcttgtgtttctaattcagaggatatgtaatgtcaaatattaaacattggcagaacttcgggattttaagcaaaactggttgcatagattgtgttaaatcattaaatttagaagataatcaattacctttatttccttgccatcaagcctgttctcactgatctttctgagtttggctttctgtaatctgagtgttctttggtttcttcttgagtatggttagttaaataattgaccaaataatcattcaggtaacataatgtttaaaaaaaaatatgttgtaagttaggagtcatcaatcacattgatttggattagaacttccaaggactgtttccctggtgtcactgaggagtgtatgctcgtccttcatgacattggctctgcaaggactgatgtttcatctccttaactcttgtttcaggttcttactcatcaaaaccacatatagatgatgccccaggtccagtgtactccatgaatggcagatcaaggcttagtgggaattgaatcatataattttactattcctcttgaagaaaaacaaagtataaaattataaacttaggcacaagagtaaacatttattcacagaaatagaagaaatattgaacgataattgcagaaagctgaaaaattccagaaatattccagataacctttggcttgtattaaatcagttttcccaggaacaaactccaacattcattttttttttttcctataagttacttaaataaagaaatcctcctaggggagagaagaaagccaaggacgcctgggatatcagacaaagtccccagaggatagccatcttgatctcagcagcgtcttggccaggtacagggggagctaaattttcatactactgcaggccagtcagaaactggctgtatacccagccaaggcatgcctggctccccataccaaaggaggcagtgtataaaatggtaaaatgggatctgaagaggtcaagggacacactaacatggtctgctactggattccctatgttgtaaacattgtttctccttcattacccaaatgatttttgtgccaggtgtcattatattgcaagaatgctctcttctgtgcaccagatgagatggcacagtagtagggagagaagttccttgaagccattcacaaactttggagacttagcaatgctttaaccacacatggaaatggctgtaaacaaataaatatattcccctaattaaatgcattcccattagtacttctacttagcagagattcccaagaggaagccacttcaaatctgccctacacaaggggaaatgtgatgaaaaggaagtcagaataaaaaacgatggtagacaatagattttagttcaaacacccaaattctacagatgtaacgaaagcatatgatcatgtgaatgcttttctgggatccttctcagattcttggagaggtccatgaacgtgaggggtccttaggcctatggtttatttgtttcatcataaatctacatatgattccatgctatttgttttctgggccctctgggaatttttttttaacttaaaatggacacaaaagagatttatttgcctggcacaatattaatgagaaagcaatgtaataagaatgatcacatttcaacacaagactcagttctcttccctccaatggactacttcatgaagttccttctgttcccttgtaactgacttagccaaaattatcaagggatcttactttacttgttggcttctttcaactcaactttgcagtcagacatatactaatttcagatttttctgatctgaagttgaaggctcattgttagtttaatttctcatgtgattatatcataacctcagctctcttctgatgaagatgggtctcatgaatctgtgcaatgtgatgtactcatactcatttttgtgtgtatccccatgtgtaagataagaattgagattactggggtcacaggaactggatgacatgttcattgcacactatgaccacagcctaatgtctgagtctctgacttcctatccaatcattaggcctggaccatcactgatgtggatgatatggatgtggcagggagccccccactgagtgagtttagcaatgtgatataatctactctcagggtttgggagcaacaaagttgaggtttccctgtgtgtattcctcatagtaagcagtctttgtaatgcctatatgaagtgtgagcaactgtaacatctaattcacccagatagcaactcttgatttttaattttctggaaataatggagatatccagtctttatggatggtgaggattttcagggtctggggtagtagaataaatttctatgacttctccctgttggctccatggacagctttcagattttcaatgacgtctgtttccttgccagccagcaagcacgtataggtgaggactgtgttatctttacatccctagaccttagtatactgtccagtacctaatattagctaaaaaaaagtttgttactactgattctgttctagcaatattcttattagactaaatattcccataggtcagaggttgtatttcaaacatttccttcccgagattacctgactgacacatgataagcttctaagatatttgctcatttgaatcaatgtattcaaattacattagtattaaatggatcaacacagtcacagagcagataattggttttccttctaatgtttctcttcttcctataacctgggtcaacagaatataaatatagtcatatgttaataaattttaaagaaaacttaatttgtctgtggtctacatgttcttaaagaacattgagcaccaaaagttctttaaaaaaaatgacaaagggaagacagggacttcttaaagtaaaatagtttgccccattccttgatttttgaaacaatgtaattgaatgcagttgtataacacaattcacatttcagaactgagatgttcttacttgccaagtggcacttgctgacttcccattcactctttattctattatgcacttactattggttttagagtaatttctttgtgaatgaaattgtccaatctcaatttccaacatggcttgctccattttaacattcagcgccctgttctcctaacacacctcgatcattcattgaaccttgcctttctacactcctttagatggctttatgaagatgagtatacaagttaaatattagtcatacttcaggactcaattcatttgcattctctagaaaaccttccgtgattctttaatgatgcaaacacaatgccacactcattctttgattgtttttcatgtctctagaagtcgagcttcttgaagccaaggctgcattttatttgctctgtcttctgcactcagtacaatgatggatgcaaagtaagatctcaaaatgtttagagactgactgatgggctaactctgtggttctcagctgaaagtgatcttatgctcctattcatgagacatttgacaacatctaaatacatttttgattgtttaaacagagagctgtggaagccgagaaaccttcaactaatggaatgaatactacctccactttatcttcatagactaagacaaaatgtcaaatgtagttttaatacatagagctcaaggttacaatttgccttcccatcattttttgttgttgttgtttctgaacttttcggtttatttttcaaggaaaaaaaaaacaacatagagtgactccatagtttgggaactttatttttttaatttttttttttttttttttttttttgagatggagtctcactctgccacccaggctggagtgcagtggcgtgatctcagctcgctgtaacctccacctcccaggttcaagcaattctcctgcctcagcctcctgagtagctgggattacaggcaggtgccattgtagcaggatgagtggcagacaaatcctctcagacatggagttgtagaaggaagggctttattcagctgggagcatgggcaagctactgccttaaaatccgagctacctgagtgtacaatttctgttccttttaagagctcacaacactaaagatttcacatgaaagggtcgtgattgatttgagcaagcagtgggtacgtgacaggggctgcatgcaccggtggtcagagtgaaacagaacagggcagggagtttcacaatgttcttctatacaatgtctggaatctatgaataacaccagtttctaagttatgagttgatttttaaccactaggtttaggccaggcaggcccaggcctggttttggccctggcactgggctgcctgtctttgatttcacttccttgtttttttttttttttttcttaaaacaggtactgagcataaaacaatataaaaccatatgagagggtctctctcttccctcaccatcatgcccaggtaattttcgtatttttagtagagatggggtttcaccatgttggccaggctgttctcgaactcctgacctcgtgttccgcctgcctcagcctcccaaagtgctgggattataggtgtgagccactgtgcccggtgtttcagctagtaagaagacaaatgcaaagcttgttttcttgaattaataaaaatgtaatgccttccaactaagttttcgggttagaattgtgaatacagaagtgcacctaatgtagtcaaaattagctaccaatttcaagtcacattactgaataaattagattccagtgtttgtctatgtacatgttgttattaattacccagtagtattccccaaccagcgtttcagaaataattgaatttttaaaaaatatccttagaacacaaagaagtgttctttcaaagaacatgcaaacatgcaaacaaacaaaaagcaaaaacaaaaccccccaaactcaagagattttacttaggattataaggaaatacataccaattttgtaaccaacaacagtggccacaaatatagactctagcacagcaaacataaagagtgtctgctcatgtgtatgtgtgtatgttgatcttctgcagctcacagatagatagatagataagagagatagatgatagataagagagacagatgataggtaaatgagagagaaaaagtgacaggtagcaggagattaatataaataaaacatatatgtgtacatataaataagtattctggagagtacacacacccacacacatgcacatatacacacaacccataagcacacacacatgacatatagagcctattctcttggtcattaagctagcatacactcattgtcaaaattttaaaaggcactgaaagaatagaatgcaaaagaaaataaaaaacactggcatatgaaattaagcactaggcaaaaaaagttgtccatttattatatttctgcagtacaatgagggaaaacacagatgcatctatgtttaggaatcaatttctatgcattctccagaaaaccttccttgatcctttagtgaagtaaactcaatgccagaaattgaggaactgagtcctgaagtgttattagaaacattctctacatagaatttattatcctgccttttttactgaatatatagtaagtacaagttgacaatccattaaattttcttttaacgtgattttaaatgaacacataaattcaacacattgaaggtttagggttttttcattttttatcattgcaaacagcactatcattaccattgtatgtaacatttcttcatatttaaatttgttttgaaagtaaaattatcctgaggatttttatcctgattgtttttgaatgccttatattgtatacattataccaattcacaaaactattttaaaagtagcatttaattaacacgtaatatttcacaatatgaatgtgtcaaaatttatattaatatttttattttttattgatagatcataattgtacatatttgggggtaacatgatattttgatacatacatacaatatgtaatgatcaaatctgggcaactggaatacccatcatgtcaaacatttatctttttttgtttgtctattttgagaccattacaattcttctcttctagctatttcaaaatatacaataaatgatgttaactatgattttcctactatgcttttgaatactagaccttattccttccatctaactgtgtttttgtacccatttaccaacttctcttcattccctgcaccctcccttcctggcctctagtaatcaccatcctacttgctacctttttagctcccaaatatgagtaagaacatgcagtgttttgtctggtttattgcacttaacataatggcatccagtttcatccacgttgctgtaaatgacaattcattctttcttgtggctgaataacactccactgtgtacatataccacattttctttatccattcttaagtcgatggtatcttggttattgtgaatagtacttcaataaacatgggagtgtagatatatcttcagtatactgatttcccttcttttggacatatacacagcagtgagattgctggatcatatagtagttctagttttagttttttagggacctccattactgttgtccataatggctattctactttaccttcccatcagcagtgaataagcattcccctatctgtgcatcctcacaagcatttgttactttttgtctttttgataatagccattctaagtggggtaagatgatatttcactgtggttttgatttgcattcctctgatgattagtggtgttgagcacattgatgattattaatatttctaatacattaataatataaataagttaaatatgaacattgtatataaatactcttgtacttctttgattatattcttagttcataattcatattattggcgaaaggaataagtatgtataaggctatttgtctaatagactggataatttcccactaagaaggatttttttcaacattcatcattaacaattaaaacacctgtcatatgtattattgcaaacactctattttattccaaaaataaattgacagtttgataggcaaaacaaaatattgtcatatttatatttatttatttgattatcaatgagatttgaactgttttctactttaaaagccattttttggttttctgttgcaatttacctaacatgtcctaaactacttttatctatggagatctcattttcattcttacaaattttttgaaaaccttggattttatttattttaatatatgaagggttttctacctagagtgaccagaataatatttatttctcatgttttctattttctatctctttactcccccagggagaaagaaaattttgctggaactcaatgtttgtcaacagacaagtgattgcattacccttgacagtattcactatctacagtgcaagattacaaaatagtttccaagaaagtctaggcagcatgatttctgctgtcatatccaagcaacaaattggcagagtggcatctagtacttacctagcatgagtatgctatgcattatgacttcaggtgcttcttcttttctcctattcttttctcatcataaatttcaaataataggacgtctgagcatcagctagacaagtagcactcaaacaattgtgtgggatttttttttaatcatctctactaccctgatgatgtgcccactttggaaatgattgtcctagtctcccagaggtacatctacatcaacttggctggattgaggtaaaattttcaccaaattccactggctttttaacattttgaaacagtagaaatcggtgcctgaaatacagtaatttaaacttcaagagaccataggacttgtgtaagaaaattataagtcgtcatggaatgaaaaagttttccagttctgtgtttctcaaaggttggtccagatgctcatattggtctgtgaactgtttatcatcagcctgagatgagaaaggtatagaaattaggaataaacatttgggcacttatataattatttgattttgtggtggcattattacattttgtaaaattattgattatcaatggactggaggaagaaaaaactagcccttcaccacaaaaagcttaagaaacagtccttgaacagtgatctcttctaaatccaaggtttctactcaacccctgacaattaacatgtgatcaggaagagttaaccccactcactgtgtagtcctcttgcagtttctcctttgttgggtcatgtgattattttttggggtatttttggattttttggatgtgcgaatcccaaaagcatagtgcaggtatgaatcaacatctttagagaataaactttagaatcttgtaagatttgggatttaataaagtagataaaaatcgtgttacagaatgaatattatagaaacaaaattataacaaattaggatctttcattttagactagtttattagcaataaaaaagtaaatatatatagttaacatgataaaaattcaagaggaagtatttacataggaaaagattgagagagggtcttgagaaaactgttaaacagctatgttagcaaaaatgagtcctatttttccatagattagatggttcaaatatataaacatgtcacttcctttctaattgttctaaaggtttaatgcaatttttatcaaaatccaagcaagtcttttgtacatagataagcttattctaaggtatatctaaagttacaggccctagaataaaacaattatgaaaattaaagaataaagtgggcaattttgaaaaatagagaataaagtattacttacctatcagaccagacacaattttaaaaacgaataattgacaacaaatgccagtgaggatgcatggaaacctagtgactctcacttggtcgtgggtgtctaaaatggcacagctactctgacaaagagcttgacagtttcctataacactaactatgcaattgccatgtgaaccagcaattgtgctcatgggcatttgtcccacggaaataaagacttatgttcacacaaatactgtataaaatgtctgtagcaggtttatctctaataacccaaaactggcagcaaccaggtgtccttcagcaaactgtgagacatccatgtcagcagtccccaacctttatggcagcagggactggtttcgtggaagacaattttttccatggatcggggtgggggatggttttgggatgaatcaagcacattacatttattgtgcactttatttctaatatttgtattgtaatatataatgaaataattatgaaattcaccataatgtagaatcagtgggagctctgagcttgttttcctgcaactatggtcctatctgggggtgacaggagacagtgacagaaaccaggcattagattttcctaaggaatgcgcagcctaggtcccttgcatgtgccgttcacaatagtgttcacgcgttcctatgagaatctagtgccaccactgatctgacaggaggtggaactcagatggtaatgcaggaatggggagcgactgcaaatacagaggaagctttgcttgctagcctgctgctcgcctcctgctgtgttgcccagttcctaacagactacggaccaatagcagtccatggcccgggggttggagaccctgatccatatcatgtaatattacccagcagtaaagtgaaaaaaaaaaaaaaaaaaaaaaaaaaaaaaaaacaaaaaaaactaatgatacacatagtttgcgtccacttatataacatttcacctatataatgttcttgaagtgaaaaaaataataattaaatataaaacagattagtgactgccagaggctgggagagtgaggatgcagtggaggtgggggaggggagaggttaacaaagcataacaggagcaggggattcttacggttatcaaattactctgtaccttgacagggtgatgaacacatgcttctatctacatatgtgttaaattgttcagaagtaaatacatacatacacataaatgaatacaagtaaacctggagacatccaaatgaatcagtggtttccatcaaagtcaatatcctggttgtgatattgctttgcaagatattacctttagtgaaactaggaataaacgttacatgagatctctctgtattatttctaccggtacaagtgaattgattattattgtcaaattaacattttagttaaaaaatggatcctactgccgggcgcggtggctcaagcctgtaatcccagcactttgggaggccgaggcgggcggatcacgaggtcaggagatcgagaccatcctggctaacatagtgaaaccccgtctctattaaaaatacaaaaaattagctgggcgtggtggcgggtgcctgtagtccgagctactcgggaggctgaggcaggagaatgacgtgaaccctggaggtggagcttgcagtgagccgagatcgcgccactgcactccagcctgggaggcagagcaagactccgtctcaaaaaaaaaaaacaagatcctactataagatcttgctgtgaatgtcaaacataaaattcaggctgcaattgtaatgtaatttagtttgaacattaaactattaaccaaaacattctaccttttctactataacatttatgcattatcttgatacattgtggttgtatttcacaagataaagtccctatgaaattacttcattatcatacactgtgaaaatttgtttcctattatccatggacttattttatattatgactttttctgataataattaatataggataatgaagacctccttacatagaaatgacaataaggcctcagtagccctactgcagaatttcctgggatgcaaagacatgggcagctgcctctcttgaatttcccgtggttctctggaagacggtctcatcacagtgggcttggtggagggccatccaaggagccggggtggagggcaatgcctggtgtcctgcttggcatcaactttggatttctgaataaatgacaggcatgggggacgtgctaagtgtcatttggcaccactcctgcaccaaactctgctgtcatttgggctaggaagcctgttctttttgaaagaacaaagcttgtttcagggtcagctgccaattgtgtttgacattttagttctacaaattaaataccctggtaaaattttctctaggattctagtaataagttggctgtcgtggtttttaatgttattttctgtggcttctaaggctttgtaaggggaaattgggagaatctgagtgatagacttttgtcccaagaccatcaagaagtcagaaagatgctccttgccttccaaatcttacatgtttgttgattagaaaatatttttggcacaatagattgtactgagtattcctagtgattaattttagttttgcttttatgaaaatcagacgaatatagctttagagtttctaaaatcttgatgacacttgtttttatatttaatacattcatatatcaaatatctattttatctttattttggctaagaattgtcataaaactctgtttgagcctttattccaaaatttatttaacttctctgtaatcgaattagcatttatttccaactaatctgtgatgctacatttattatttattaaattcctgtgtctgtttctgaggttcagttcctattagctattaatattacttacaccacgctattttcattactgtactttgcaatttatatcattaacacaaggagtcctgattttagtatcattcttttgcatagtttccttcaatattcctgctcatttactctggtagataaacttatgaattactttgccaaggtaaaagaatagtccactctatttttaattgcattgcattaaaccccgcattgatttagaaagaatgtcatgtttggcaacatttagtcttcatatttaggactatgatatatttctccatttattcaagttttcttttatgaccttctgtaaagtttcatggttctttcagagcaatcaggtaattgcttgttataaccattcctaggaaaaatgttatgttttcttgctatttcaaatagaatctccaactctgttctccaaaacgttattaatttaaatatgtgatatataaaaaatacatccatttcttccaaattgcaactagaagattacagtttgggcccttccaggaagttcccgactgtagtgttcattatgtagcacccaaaaaatagaagcctttagtcacttcatccagcaaaaatagttaccccttgtgtgcattgcatggaactttctcattggtaaatattattatgtaaaatattttttccagccaaacacttttgacttcatttatgttttggtgtacacagtgtccaaaaggtagtttatttatactcttcttgctgaatgtattcattataaagaaaagggatcaaaacttcctggaattagggaaattcaggacataattgcttaaggatgctgcattgcagtttctgaatttatccaaggtttctctcttatttgttcatattgagttacagaatctctgactctagggtttatgatgcctcaaatgaacctttgtagaccaagcagtttgatatacataatgtccttctttcttggaaatctcaactcaacagcactgtgttcagggagttacctatgagaatgttaattacaggtgactcccaaggaaataagttatcaattatatctgagtgtttcaatatttcctctgaaatgataataatgcaccttacgtttcagtattatctgatagaatgctgtaaattcagctaacacttgtcaagaggcttgtggcatctttaaatcacagatcttaatgaaggtttgtcaaggcccaagctaagtaaatgtgtttcatgtatcaaagggaattacatttccttttgtccctctatattcaggctaaaaacaaaggggaaattaacttgggaagtaaattacttgttattgggttggaacaaaaattctagcaatattctcctaaacacctttttggtaaccatttaaagatatgaggctaattacaatctgtgtgcaaaatcagatttataattagtactgaaatgaattactgcatcaaaaaattgaattcttgtggtcaaagtagattcttcacacaatagatacactattttgatatacaaatagaaacatttactttaggaacaccaatttgaaaactgagtgttttttgtcatgatactttctgccttttgctccttctgcaaaaggccagatttgttttaaagagggaacaggggcatgatctagtctttttctaccttgctctactacctcttgactgctgttcttctgccacgttgtagcagagagaagttaaaatggcaaagccttcctccagctccctcctgggttgatttttgcagcttctagggctttaaaggaccagttcacatggccctttgtgctttatccatctgttatgggttaaattgtgtctcctaaaaatatgtatgttaaagtcctcaccttcattgcctctgaatgtgatcttatctgaaaataaggtctttacacagataataaagtttaaatgaggtcattagggtataccctcatccaatatgactggtgtccttatgaaaagaggaaatttggatgcagagacagatatgcacagagaaaagaccatgtgaagccacaaggagagctccatgtgaagatgaaagcacagattggagcaatgtatctacaagccatggacaccaagattgctgatgaatctccagctggcgaatcatcttctaagtgaggaatcacttagaagagaagtatgtaacagactctctcttgcacccctcagcaggaaccaaccctgctcatttcttgattttggacttctggcttccagacaatacatttctgttgtttaagccacccagtttgtgatactttgttacagcggcccagcaaactaatacaccagtcaaagaaggctgactccaaattctatgcagaaattccctctccgtaaatctctggctgttccctgaaacacatgtgcttgtacaagaatacctaaaaataaaagaattaaactaaaatttagcctgctgcctcagaaacagcttgcaatttaagccctaccagattaattatctgctgaaacagaacatgaacatcctttcaagaaaaataacaggctgggcaccgtggctcatgcctgcaatcccagcactttgggaagctgaggagggtggatcatttgaggccaggagtttgagaccagactgaccaacatggtgaaaccccatctctactaaaaatacaaaaaaatattagccaggtgtggcggggcgtgcctgtagtcccagctacttgggaggctgaggcaggagaatcgcttgaacctgggaggcagaggctgaagtgagccaagatcacaccactgcactccagcctgggggacagagggagactccatctcaaaaaaaaaaggaaagaaagaaaaatagcaaatttcggagtctcacaacatgctggatacaattcaaatttgctcaattttagaagacattcaactgagatcaaccccaagatgacccagatgttgtttttcaaaagggtaataaaaactatgatagctttgcttaataaaataaataaaatttgcttctagtaatgaaaagataggaaatattggaagagaaacaaaagctattaaaaacagccatatgagaattctaaaactgaaaaatataatatctgaaattttaaaaaacaatgggtcaacttaatagaaaaatgcagctgaaaaaggaaagagacagtcaataggttaaaattttctacatccttgctagcattcaatatttgtcttttaattttagctattatactaggtatgtaacgttatcccattgtgcctttaatttctatttccctaatgaataatgatcttgaaaatattttcatgtgtgtatttgccatctattattccctttggtaatgtgcctgttcaagtcctatttccattttctaattgaattttttttaattaagagtttatattctgggtacgagtcctttgttggacatactcttatcatcctcagtaggagggttgatttgaattagtaaatgtgttattggtgaaagtaaaagtgccactggtgaaagtaaaagtatgcatctttatttttaaggggtgttaggcttgtattctaggttgatagttactttctttcagcactttaaaaatattatgccaaatagcataatgttttggattatgatagtatcaactgtagcaaatcaatattaatcatcacaatttggccagtttgtatacttgattaggcaatcactctaatatatatatatatatttatatatatatatgaaatatataaaataaatatataataacactcatatatatcactttaatatataaaacacacatgtatatgtgtatgtaacatacacatatgtattttatatattatataatatataattacatataaataacatatagaatatatattacacataatatcttatgtataatatcactctaatatgtatatatcagtctaatacacataaaatatatgtatttatatgttatgtattataacatatgcattatatatgtattttatatatattatatattatatgtattatatataaatatatatgtactttatatatgacatatatctttatatatgtatattatatatattatatatataatgtcttgtaaaaggagattttgtattgagcaccagaatgtggcatccagaaaagtgacagtcttcttggtttcttctttctctcccagatctatcactaaattcttcccctattgtaggactcagatttctctggacaggcttccttaaccctaaactaaaagccacatgccaaatattctaagtatagcttttgaagggtgggaagattaaaattttaaactatgacaagacattcaggaaatctacagtactccttcttaatttctacatctgacccattttgcttgatttctttatctgacatattttgtttttgaaaacttacttgccagtttggatttcctttctctctctttcttcccttttttcttctcaaccattatacctcccaaaaaatccttagcatggaagcgtcacttcagaccatattttctgcagaaatgggctaataaaattggcaagcgagattggcaaatgggttttggctaaagattattggtttgctgctgttgatatcacgatcaaaagcttcaggctatttgtccttggctgcccctgtactgaagtaggcaccctgctgttcaccttctgccttgttcacttacaaatttaggcactcagagtcatctggtaagttctcatatctagtttaaaaggaacagttgagaaaaggcaggccaagggcactgtctgaaggtctttatagcactttgtccttggacccttgcggagtagccaccctccatacatatgtacgaagcaaatgttctccccacccctccttgttgtctgtgcattattcactactgatgagaactctgtactgatcatttatagagcacatcgggtcattgcctttgatttccttttgctctcaaagggcatttgaaacaaagcacaatattcagtctggatggtttaggccccaggagaggggagtagggtgcccaaatacagcctgctttcattaaatgaaggctcactccaaggggattaaacgatctaattctatactccttttattctgtttcttttaagagacagaataccttattacttatcatattattgaagatctaacatatatttacaattgtgctattaaagctgtagtttattacaacaaacattgatcaatcacttttatatactctatattgctatacatttaagctgaggaaggcacaaatttaatctgtgatataaaacctgttctcagatgacttacagtggtagaattgggggaagacctggctgatacacaggaaacaataagggagtacaagagtgagtacagaaaaaagtgcaaaaggaaatatacacgatctttgacatgcatgtggcataccatgggtgctgagtagtcgcaatggagagagactttgaggacttctcagagaagtaaaaagatattattaatagtatattagtatctacacaaactattgcctgcaaggagagagacatagagtggatcttggaaaataaaatactggcaaatatactcatatttttcttttccctattatacatgtgtttttggcaaaaaatgataacattaatgtattttatatatatatatatatatatatatattaattgcagaaaatagtaagttacatttatggcataataagaaacctagagtccagggttggtgaaatgacttcacaatattatcagtgtctcaagatcctcctgtctttctgcccacccaggcttagcatatggctgtcatctccacttgtttgcctcaccctgttcttttcttttcttttctttttttttttttttttttgagacggagtttcgctcttgttgcccaggctggagtgcaatggcatgatctcggttcgctataactctgcctcctgggttcaagcaattctcctgcttcagcttcccgagtagctgggattacaggtgtctgccaccacgcccggctgattttgtatttttagtagagacgggatttcaccatgttggtcaggctagtctcgaactcctgacctcaggtgatctgcccacctcggcctcccaaagtgctgggattacaggcatgagtcatcgcacctggccttgcctcaccctttcaatatggctgctggacctccagcctcatatttcagtcactctggatgttgtgaggctgtgaggctctgctcagctttccattctgggggactgcaagcctaaagtgctcagatgtcagcccctcacaagaattgtcttagctcaaagccatgcccattttctgaaatggcatcatccaataagtgattggcatagagctcagtcttttttgtgcaacatggaataatactgaagggtcatcttatctcgagagcgccttgtagctttgtctgaactttctgttcacactgcattacctctcctcttccctcctgtgcccaatcatactctcctttctttgctcctcaagttttgatcctatgagaactcctaacaagctctctgcatactaatctcagtcgcagagtctgctgcccgagttacccaagctatggcacactttgagtagaaataagctggatatagtaaggaagaaggggtgtccatgtcaggaaaggcaaatttttctcagatacccaggagaaatgtgatatgtccaaattgacagaattgtatttcacagccacccttaactacaagtgagactgatagcatacactttgggctggatgtgttgccttttcacacagaatatgagattactacttttcccaaaaagtccccaggagacatctgcactgaagagaactgaattacctggccatcataaacagcgaggaagactgcaaaatgccctttttacctggatacactgtctccacaaacaaaaattgaaattttattattgagaaagaaggcaagattgacgcttggataaatatcagtatatgtgatacataaagtaatgacattgataattaatacttacggacatcttactatgtatcaggtattttgctatgcagagttttatatactgggttatttagatttctcagtaatcttcttatgaaacccccaagatctgtggaactcacaagttaatgtttctgtgtgtacattaacacactacttataatattttctttggtaggtcccaaataagttacaaagaactgtaaatgtcttgtcatatatccttctcatgatcaacagtatgagctattattgctaaccccatttaacagatgattaaactggggcatataaggcttaaattgcattattgaggccacatagctgccaagatgaaaaactgggattcgacccacctgtttctgacccttcagcatattcttttcagaaccgcactcctcaaatcttctgctctggtgaagagatttcagctttaggactacccgtattttgtaagtgactcagcagttcgtgcccttatattctaagccttatgcttgatggcgtagaatgaaaattttacttgttatccttgaagagtatattccggtgggaataaacagaaatgcaactgccacagaggatacaaggtgattgttgctataatagcagtatgtaaactttatggggaagggaggaacaattaaatcaatctaagaacgtgagtaacttggagcttggaatcaagtaactttagggcattaataagatgatgtcttcagatccctttaattatgtcacaactcctttttgggttctgataaccattcattttggataaagtgaggtaatgttgatatgagtagaattcctatgttattttggccatgtaataaatggcatttattttgctcatgagcctgcaatttcagtaaggctcagtgctggaatgtgtctctgctccacttagtatcaactaggggctggaattgtccaaaggcgtgctcacccacacttctggtgtctggtgctagttcttggctgaaacttcagctagggtttccagggtctaatctggggcttccacaattcagtggctgggttccaaagtagtatgtcagcgagagagagctaggtccacaatatgacctagcctcggaagttccatagcatcatttgtatcatgctctattggacagagcagtaacatgcacctgagaaaattcaagagaaagaaacagctatcctgatccttggttggaggagagccagtcatgttgtaggaaaagcatgtggagtgaaacacacacacacacaggggaagacatcttctgaaaatgcgaaggtccacaaattaatcatgtgaatgtagccaggattatggaagaggctgtttattgaaagattaagtatttgtccctactgcctacaggtccattccacagcgactaaatgaaataatgtctgtgtcttagtttcttcacctgagacatgttttattttggtagagtgaacatgtttgtccatttgggtttaggactgctataacaaaataccttaggctgggtaatatttacaaacaacagaaatgtattgctcaccattatgggagtgtagaagtccaagattgaggcaccagcagacttggtgtctggtgagggctccttctctgcttgaacggtgatggcttctcaccgaattctcacatgggagaaggacagaatggcttcctccagcctcttttataaaggcactaatcccatttatgagagtggagtcctcatgacctaatcacctcccaaagacctctataattccttcctagcctgatgttttcaaaccatgttcagaagcaatattgaagttccatatagttctttcagtaatattgattgggtagcatcatatgtcaaacactagaatcagatttgagaataaaaataattttaaagaaatgcattaccctttttcctcaaagatctcaatctgcatttggaacacacacacacacacacacacacacacacacacacacacacacacgcacacacacattattagaaaataacccagaagggaagtgacagaatatacttaaccacattatagaaacacagaaagatggctggtcgcggtggctcacgcctgtaatcccagcactttgggagatcgaggtgggcggatcacgaggtcaggagatcgagaccatcctggccaacatggtgaaaccctgtctctactaaaaatacaaaaaattagccgggcaaggtggcgggcacctgtagtcccaggtactcgggaagctgaggcaggagaatgacatgaacccgggaggcagagcttgcagtgagccgagatcatgctactgcactccagcctaggcgacaaagcaagactctgtctcaaaaaaaaaaaaaaaaaaaaaaaaaaagaaacacagaaagatgtgttcacggacacagggaggagaacatcacacactggggcctgttgggggatgggggggttaggggagggttagcatcaggagaaatacctaatgtagatgacaggttgatgggtacagcaaaccaccatggcatgtgtttacctatgtaacaaacctgcatgttctgtgcacgtatttcagaacttaaagtattaaaaaaaaaaggaaaagaaaataaacacagaaagatagaacacttaacccttcctgaaggaggtgaactttcctggaagacatgaaccctaaaggttgcacaaactttaggcaaaaaaaaaaaaaaaaaaaatccatgtttggtgtgggaggtggtagtgaggcattcctaatattaccaaaagcaagaaggcattcctagtattaccataagcatggcttatgggaaaacggccactttcctgtagacaggggcagatatgagccatggctacaagggttgtcagcgtccgatcatagtgaaacctgctcacgggctgtattgttgaaatccctaggtggaaacattacagtcggaggcaagttacagtcatgagcatttttcattgtgggtaatcataatttttgaggattccacattttaataatttcccgcagtgcaattcctgcctttacaatgtacaatatacatatatcttttcttattgttaaggaatttatttatgatttaggctcaccaatcaaactctgagaaatttgattttggatattaattccacgagaaaataatcagggcatgcagtattcactttggtgatctggaagattgaagaggctgtgggattctgtgattgggagtgggagaagcagctttctgatcgcagaaagggtagcatgatgtgtggttctgttagtttctcttggaagtttagctaagagcctattcctcatggtcttccaaaaattctcttccatgtgttagttttttttctgcctaaccatcttgaatgaattctgttctttgtaaccaaacactctggcagatgcttaaccctacacctcgcttcctcatatacaaattatattaattataagagtacttatcacagaaataatgtaagatattaacagaataattcattagttgtaagacaaccaaattctttcacaccacaactaggctttttagtgggaaatatacctaatttgttttctttataactgattttctgtctgtccaaatccccaaaacgaagtgtataattttatatgaatatttaaatggcctatttagcaaataaacttttgtttggctcagatcacttcatctcttaattaacctcagcctcttctggcttcttgctctaagattttatacaggtttagagagtgggaacgtgtgtgtacttgacaaattaagtgaagaagtagctgaactcttcttggttgtgtgccagccaacgtctgacagccttaggctggtggcctctgactattgtataatcttctggaatctgatgcagaagtcttctgccagtgacttcttgaacttgacttgggcggccttcccaatggcactctatggatgtcataacctgcttgataccctgctggctgcagacccttccttctcttgccatgttctttagcctgacaggtggttggcatattttacttcagcctctttgcttgggttaccctgcttgccttttaatagttccattatatgagaattggagtctgcttggaaaatttatacctcacagtattgttaatgcctggctgaggcacttttgaagtggtggtgccagcttggtgtggagaagcttatcaggtggcttctatcagagccacatttaaggcagtgggcacaaagcatttttttctttcccagtgggcttagccacatgactttcttggccaaaggtatgtgggtggaagtaacagtgccaatctgaagctgcagctttgagtcctaccacatttccatttgcctttttgagttcccgtgcatgctcataagttatttgctatcattgttaaatcgtattatgctaggcaatgggatggccatatggggattttaaataatcctgtggtagtttagtaaactatggatttgagtggtgttagctttaaaatggagatggtcttatctgatctgggtgagacaggagaaggtggtgctcatctgggggtgcacctctcctttttccctgctccttccgcaccatggatgaaagacggctatgattttgtatggtgttagacacatgtttccagatggttatatggagagattttgaagaccaattatgtaactcaggtttgtgaaatgaccctatggcgtttctagccactttttttctgtttgtttttataaattcaattttatttacctactattaaatagagacaatttaaggttataaaataatcaaggaaacaagtaagatggcaatggaaaatgtgctgagtcttggaaagttactaaatactaacataaggttgattttttacattataaagttaaattatatttatttattttgggcagagttttgaactgctttgataaatggtaagagcttactctatatgctactgacttggctaaattctgaatcccaaatcctgaaattaccatacagtggagtcatatatttaggcgggtctctaaagcagtgactttttaagataactgaagagttatatttattaccagtaatgttccctttatttatatcctaacttttacagcctaatattcttatgtaatttgtgtgtgtgttatatttcctctaacatctctctttaacactctgtcaatgaacgtaaacagggagagttctaggaaaaattgaaatggcaaaaacaagcatttattgaatgcctactatatgccagatgctaagatggatcatttccttttagccatacaaccacacaaatgtataggtaacaatattaccccatttttaaattgaggaaactgaatttcagaagtaacttacccacaaccacagatgagttggtgggtgagatatgattggactccagttcatgcatgcaatatttactgtgtgccttttaaaactccagtctgcagatccctccactaatttcatggattccttcttcttcccaaatgaacgaaaaatatgttattgctcagtggatcccaggcttctgtgtaaagaagaaccacctttaggcatattgttcaaagatttcatttcccagattttacgtaaagagacttaggctccttaatccttcctctgcatgtccagaatctgcatttttaaagatcccataaggggccacacatgcacttttggagagacacaactatagagtttaggacagagtacacattcagaaatatttgctgaatgaatgaacaatgggcaaacaacttacctaatatgtaatctctatcaaataaaccacagttctcaaaacacccagaatctgaatttcaacttgagctcatttcacatacctcgctaaattaaaggaggcggggagctctcagcaggtgaaataggtgtaactgccaaccacatcactgattctgttgattccatcccatagccctatcctggggcttaacccatcctgttccttaggggtcctatgtgttcctgagcccttcatgcatccttttcatgatttccactcaaacattcctccttacagagcccttaattgactcttccttaacaacttttatcattttataattactctgccttatttgattcctgccatcatattaactactttttgaatgaacaaactatggttttataccttatcagtctctctttctctagaatgagggcttcacaaagtcaggtagctctctcttactttaaatctaaagagactaattcagtgtctggtatctggcagggcttctgtgaataactggtaagtgaatggatcaacatgtttgaatcaaggaactctatgcatttatactatatcaggacacataggagaaaagttaacaattaaacaactgattagctgtcattctgactattttatgaggctcaagtcttgtgtgaatttagtgtgaacttttttcatcatttttcaaatgtcttctcaaaatagaccctatcacataccagggatccaagtaatgcttttaccatagtttgggaatcagttttgaaatcaagttttctccgaacaatgtcaacttcaccagtggtaaatgtcagctgcgggagcagctgaaagaagaaaatgagagattgaacagggttcagctcaaatcttccattattccaggtgtctaatagctgtctctttgtttatataaatctaaacagatagtgtgtgatgatagttttagggaaggctcccagacatggagaaacaggctgtcaacatgatgaaacaggcagtagactaattttggggaaaaaagtaaaataaaatgctatattatgaagtaaattctttgcaatcttttgagcagctaataccaggaaagagaaaaaatagaagcaggcaactcacaagtgttacagtatttgccaaagaaaattttctttaatttatgtcacttacataactacaggtatagtaaagatttaatgtatctttgaagtgtttaaacgcccacaacagcaatgtaacagctgccgttagagatttgtctccaacatcagactagaaggtacattgtcactacagaagagcatcagtgacagtagtattgttctctctcttttctttcttttcatccttggtttcattctcttctttttctcctttcccttcccttcccttcccttcccttcccttcccttcccttcccttcccttcccttccctttccttcccttccctgcccttgccgcctcctttcctcctttcctgccttccttccttcctccctccctccctccctccctcccttctgtcttttcttaaagaagactacattatttgggatgctgaacttccactaccttaccactaccttaacatagccagcaaaactctctgggtgttaaaatgccacactgaagacatacggagaagagggcattgccttcaagccagcaacaattaattccttcattagtttgagtgtagctttccattggtctgctatatttcataaaactgcactgtttaagatgataagcaaggtgctcatcagcacttttggaaagaggaagaaaccaaccgtatgcagatcagtttgaaaatgatgaaaaatttttatccctgtcttcttcctctactttgacctcattagagtgggaaaaatgaagtggaaaactcattagactgtgaagaaatgaggcctgggttttcttctgttttgtggccttgaagaacttagtaaacttttggggcctcagttgcataatttgtaacataatagaggcttgggattccagcacataagaatgttctcctttgaaaaatgatttatttctggtcctttgatagatatggttaacaaaagctgtaataattgaactttatatgccaaccacaattctatgcgtttaccatctatcaacactcttacttacttctcataacacacttggttagacatatgctaatattgccatcattttctagctgagaaaatgtgaggattaaagaggttaagtaatccatccgagatttcttaattctggcctgctcccagatttgaaccacggcaatctagaaataaatatcatcctatcacttttcaaggaattgagtttctataacctcacatttggtatcagttttaagcttctccacttaacaacggtttaagtctcagtaagttactggttgtgcctcagtttcttcttctgtaaaagagattggcacagtgctttcctcaaggctgtttggaggaattcaattatcttatattattatattagtcaggacaggctgggttatgcttcagtaacatttgagtgttcaaactttagtggtttaagacaacaaagatttatttgtcactatgtctcatgtttaatacagttggcagagcttctgccccatataataactcacaggcttgggctgattaaggctctcacagctgaagagtcccctgcacgtagggaaaaagaaagcaactggagagctgcctatattcactgtctagtctgatgtgacccacatcacagctgttggccagaactagtcatgtggctttgcccaactgtcatcaagttagcaggtgcaggggaacaaataagagagtgggcggtcattgctctctgtgccaaaaatgtgaaggtctttcataagattcctgacatgtggctaccactcaataagtggttattactgccattatcagacgaatcacaataaaagcatgagtgagatattgttacctattgttaggcattgcaaaatgatgttaaaattgaaagcattcaataccatgacttttcaagaggtgttgaaatgtagagattaacagaaatgccagatgatggcttttttgaaccctaaagataaagtattaattcttcctaagtcacaggtcaatctggaatcattgcatacatggttaattcactattctttagcttttcttcctgagctctttctgtgttacactcacctgtccataaacaacaaaaagttgagtattgtcaaaggaacaacttgctcatcccattggctgattgaacataaattatcttcatccttttatgcctcttcagctcatttataaggtattgccctttattatgacagattttatgatattttgtgatgaccagccatgaagagaaaaaggtttaatgcactgacatctaattttattttctctggtacctattcattttttagaagcatttgactttgtgccagtttaagcaagaaactttaaaaaggagatgatgacagggttgggaattaaacctttaaatcagaacaggattggaaagacaaatcacaaagagatttcagtcatttagcttccctcctagcatgttaataagtggtactcacaaaataaaaaaaagcaccataccagcctgttctctgtaaaatgtaggtgtagtatgtgccatttctaggctggacgatgagttattaacaccaacccaaactaaggggagggtgaaaacatacactgagcacttaatatatccaaatcccataattgatattttatttacattgtctcactttaccttcaataaatactgcaaaattgctataatttttttagtattaaaatgtgaaaaataaacttacagttagaatgaacaagttctgtggacctattgttcagcatggtaatgctagttaatgataatatcttgtaaactttaaagttgctaacacagtagatctttaatgttctcaccacaaaaaaagataagtatgtgaggtggtagatatatttattcatttgaattaattttttcaaactgcatacatacatcaaagcatcacattgtacaccataaatataaatcatttggctgggcgcagtggctcacacctgtaatcccagcactttgggaggccaaggtggacaaatcacctgaggtcaggagttcgaaactaacctggccaacatggtgaaaccctgtctctactaaaaatacaaaaaaattagctgggtgtggtagtccatgcctgtaatcccagctactcgggaggctgaggcaggagaattgcttgaacctgagaggtggaggttgcagtgagccgagattgtaccacttgcactccagcctgggcaacagagtgagaatctctctcaaaaaaaaaaaaaaaaaaaaaaaaaaaaaaaatatatatatatatatatatatatatttgtgtatatacacgtatatgtgtgtgtgtgtgtgtgtatatatataaagatatacatatataaaggtatatataaagatatatatatataaaggtatatatatatatacacactattttgtcaattacatcttaaagcttggagattttttgaatatatacaatagaaactggaagaagaaggaggtaaatttaagcttgcttcacactttggctttctttttacaaagcaaaatacctgtttgcttgtcctttgcacctgcagtttcctccggttgaatggtcttttcccagatttttgcatggctgtcttcatcttatcatttgtctcaacaaaaatttcttggggttaaggagggatcttccctatggaaagtttcttccaactcccaacccttgattctctcctgcatcatcctggatttgttatgtttgtacacatttcataagaaagtagttcactgtttatatgctcattgcttattttgtctttctaattatgccaagtttatcagggcaagggccttgtatatcttatttgtgaccttatctccagtgcttagaagaatctctggcaaagagtaattgctcagtgagtactttttaaggtttatcaatatagtttttagccagagacactgaaactcgaaaaagagaagtcacttgctcaagatcacatgtcatgaaaatggcagcgctgggtctaaaacccaggcagtagctctaataggtgacagagagagcaattacctttttgtcactcactcttcgaagtgcttcagatgtattaactcattaattcccactacaatgcacttcgttttcattcacatattacagataaggaaaataaaacagaaagtttcaataacttgccgaaagtatcttactttattgtccaccaccccttctctacactgtactgtctctcaagcatagctttcagaatattattcattcttttatttaataaaaagtgagaatgttctttagcctaatctcctctgctcaggtaagggagaggggaactgaaatataagttttccaatcatctgcacaggctttatttactaacacagtgaattgtagtctgcttacgtagagtcactcaatgaacatttgttaatgaatgaatgagtgattgaaatggcatatattcaaaaggaacagaacatttatttcaggatcactgaaagtagttgattgatgtgttcattgatttagattgtgtaatttaaccttacccaagacttcttatagcttggaagttattatccttcctttacagaggaggaacttgagtatgcacaaaatgtgatgtgtcattatgcttgtttacattccaattacctgtgagggttgaactgatatctgaatgtgtaaggttgtaaaggagtcagacaggtatccacccaagtaatagttctgccacttaagttagtacctgtgggaatttgcagatttcactttacctctgagtttccacttactcatctctaaaatggaaatactaatagtgcctacctaatggcaaagatttagtaaatttttaaatgtaaagttcttaacacagtgccaacacatagtgaaaaaacttatgggtgttggatttcctcatcttgaggcaagaccagtgttagataaagaccaaagtttattcttcacactccgtgatctcaagcccgtcactctctctcatatcattgaagtggtttggggatcagcaagatcctaggcatatcactgtgtccatctcctagtgggagagggggctctccagatatgcactggctgcagggagggaggcccaacctccaagaaagcaagatccagattttaattctggttcttctgcttgttcgttgtgtgatctttgggaagttacttaactcctctaagtttcagtagtcttcaaatctgtaaaatcgggctaatgcctatataatgtggtagttatgatgatgatatgagataatatatgtataacagagtgatacagttaagctttgtgtccccactcaatctcatcttgaattataatccccataatgcacctgtgtcaagggagtgaccaggtggaggtaattgaatcatggtggtggtttcccccatgctgttctcatgacagtgaatgagttctcacaaaatctgatggttttataaggggtcttccccttttgcttggcacttctctttcctgccgccttgtgaagggggtgccttgcttccccttcagcattcaccatgattgtcagttttctgagttctccccagccatgctgaactgtgaagtcaattaaacctctttcctttataaattacctagtctcaggcagttctttatagcaatatgaaaatagactaatacacatagtctggctcaaaggcattgctaaaaaatgctaaccaatagtattgatgtcttttaaataaaaatgcctaactggaagcagaagttgtacctttctcattgatcttcaactaggtttacttgcccccttatttgcctattttctgttcccaaatctgtcagttcaaggcaaaaccatgacctcaccctaacaattgcattctgggcatgttagttgtataatcacattgccctgtcacgctggcatctttaatcattttaaaggtagtcttgacttggccatattcttgtttaactactttaagcaaattaattagctttgtggggcccccaatgccattaattcatggtctataaaacctcagacctaattgaactttttaatattgtgtctttactacctgatataagtgtcttttaaattattagaattcctacagttaatgccttattaaatagctacatatatatggaagtatgaaaaatttccaagattgcaaagtaatcaaaacccagattaaatcaaggatgattttatatctgttttattatatgtttaaaaattaccaagaagtttgagtatgtaatgagaagtagtaggaatgcctcatatttctagctggcaaagaatacatgtggtgttaggtatctgagagtttatcagttaatttccattaactaaagtatatgaacaatgaaatactatcttaaagctacaataaaatgtcatttcaaaacttgtaagataactgaaatcaaagggacagataatgacaagtgttggcaaagatgtggagaaattggtatcctaatacacagctggtgggaatgcaaagtggtatgtcactttggaaaacaatctggtagttctcagccattccatgcataggtatatagtcgagagaagtgaaaacatatgttaacataaaaatgtgtacacaagtgtgcacagcagcattattcaaaatagcccaaatctctgtcaactgatgaatggatgactacaatgtgctaggtccatataatggaatattatttggcaataaaaaggaatgaagtatggatgcagactacacataaatagactttgaaaatattatgctatgtaaaagtacccagtcccaaaggtacatatggtacaattttatttatatgcagtgtctagaataagcaaacttttagagacagaaagtagagtaatatttgcctaggtctgtaaaaggaggcagaatggagaaaggttactaatcagcatagagtttctttttggggttgcaaaaatatttctaaaattagattttgataatggtcgcacagttttgtaaatacagtcaaccctctgtatttgtgttccgcatctgtgaattcaaccaaggattgaaaacattcagaaaaaaaaggatggttgcatctttactaaacttctatagatatttttctttgtcattattccctaaacagtacattataacaaccatttacatgcaatttacactatattagatattataagatgtagagatgattttaagtgtatgtcagaatgtgcgtaggttatatgcaaatactacaccattttatataagagaatggagcatctgtatatttggggatccacaggagttcctggaaccaattccccatggatactgagggacaattgtatattaaaaaccgctgaatagtatactttgtgtggacaaaatataaggtatgtgaattatatctcaatgaagctgctttgaatttttctaaagaaccaaattatacaaaaataataatcaaagaaaaggtatttgggagccaacttaatacactacagatagaagaatttgagtgtcaatatggataataaatgcaataaatttaaatatgttaaaaatccatgaattcataatgatactttaaaactctcattgctttgctttacagaatattaggaagccaacttaattttctaaaaatatgtaagttaatggcaaaatcaagcatttaacctgcctcttctattcaaacagcaacttagagtaaccctgtaatctataagaaaaaaaaatccctttttagacacattcagctgataagaaggaactatagaattattatattaacattttataagtcattaaaaataatgaatctaggtattggtcataaatggccgctaatatattaaaaagaggccaggcatggtggctcacgcctgtaatgccagcagtttgggaggccaaggtgggcagattgcccaagcccagggttttgagatcagcctgggcaacatggtgaaactccatctctacaaaaaaacacaaaaaattagctggacatggtggtacatatctgtagtcccagctacttgggaggctgaggtggtaggatcccctaagccaggggagtttgaggctgcagtgagcatggatcacttcactgtgctccagcctatttctttgaccctgtctcaataaataaataaataaataagatttcactactaattaggtgcatcctgatggaattatgcaatgatacttgtacatttattatttatttttgcccaaataaatcaaacctctgaccagagttacattcaatgacatcatggggaagcagagagtgaaatccggtatgtggggacagtactggataaatagcccagtttcattaacaaaattaatggcaaagaagaagaatgaagaagcagttcttgatttaaagaaatttaagggacatattgaaatgtaacatgtgggttcagtggatttaaattagaaccaaccaactataaataaataaataaatttccagtgttgatagtcaaattttacctatatatatacaaatttatgaatcaatctggtttcagcacagcaggattttattttccaggtaatgtccttgagaatgcatgctttccttcatctttctcttctgcctcagtatcttgcagcctctttctcctcatggaggaaaagatggtctctgtatttctggacttccactattctttctgctcaaaatcccaggaaaatcccacttccctctctcccccagcatggtgtgcacttactgacttgcttccaagagcagagtatggaaagcaggctcagaagggtgaggcactgacattacagtgcaggaacctggcaaaactgcttcattcatatgcagtgcattatattaacatcctatagaataagtcatagtgatagtacatacccttgatatgatgtgttgagaagggcacttcccttctgtggcgttcttcccacaaacccataactcagtctaagcaaaacaacaaacatcagacaaacccaaattgaaggatattttaataaatacctgaccaataatgctcaaaactatttaagacatgaaaagcaaggaaaatatgtgaaactcacagacaaaaaaagcctaaggagacataagatgcctaaatgtaatatgaaatcctgaggaggagaagatcttagaacagaaaaagactactagtggcaatactagtgaaaatcaaataaagcatggagttcagttatttaaaaacagataaacaataaccaaaaatgcaaggattcccaggggctgtgtttaatcacaggttcaggcttggcaaaaaagcggcaccaaaccaaaccaacaaacccaagacacaaaagcaagttagtgctcatgatacggttgatgtaatggctagtttgagtcatagaagaattctgtggtgggttgttggagccctttaacaaataatcacctgtagaagaaggcttccttcaccagaataaatgaggagcaagcaaatcatagctctccaccatgggcaagggagctacatgcttctgggcaatgtcagggcacagagcagcagaactccagcatgtgtcataccaaatattctctaaatatatttaggttggtgcaaaagtaatcatgtttttttttgttgttgttgttttttgtgtgtgtgtgccattaaaggtcatgacaaaaaccacagttgcttttgcaccaacctaatagcaattttgagaaagacgcctccccttaatttctttatttcttttaatccttcaaaacagaggtattatgctcacaacttaatcgatgatttacagtttctacatcattccactttttcctacatactggaaagtatttttagagactcagagaagttcatttttgaattgactctgcattattggaccaaatcctcagaatccttcagacagcttcctggaatgtcctcattactatagcgtttaacagtgagccagtttcttagctgttgagtcctatacatttaaaggaattgaaaccatgaaggctcagggaacttcagcttaatctgaacaaactggaattactggatatcactggctacatctgtctgtatgaaagcatagtctgtagatctaataaagtgctttggaggttggttttaatataaattttaactattatacatgtgtcaagaagaaaggaactattcaaagataagtgtttctagtctttctttcttctttctcttcccataaagtcccctttgttaccgtgggttgaccacctttttaaggctggcaagagaaatcaagacagaggcagtgctggtgacatgaggaagaaggcgagtgtctcactagaagaaatatcataaagctacatcctgagaaaaagcaaaggccttgatggcagaccagataacagagaggcatttcagagttcagaatattcacaaaataattcacattcttgtaaaatacaagccctgtgagggcagaaactgtgactgtctcactgactattttgccatagcacccagtgcaaggcttggaacacactgataaataaatcataaataaagacagcaaaacaaaaacaaaatctaaataataactgctgagttacttgaaactttcggaaaagaaacacccgaaggaatttctaggaagttttgtagtaatatggtgacaaaattcactcttttggttcctctgcaagaaagtacaagcaacaactgaggctgttgaagccaaatctgtagttcttcttggtgtgtgtgtacatgtctgtgtgcaggtttacattaaggagaccaagcagttacagatgtattcatttataacactcataaacacacaccattactcttatccctacactccatatttacattataattatatctgtgcaattgaaaaatgaggaaaaggcacatttgcaaaaattactgctttcccatttcacacctctgtcactcattaccactgtgtgatcaaaggaacttgaaaaattaaaaggacacaattccaaaaataattatctaatgcccaaaggggtctgggatagcttaattttgactagaactaagcagatttggctgaatcaaatattgcttccttggtgtcacaaggccattcttgatgatcttcatagtgtgtataaggtaactcagatgttttgtgggtgacaaagactctttggatggaaatcagatgctatgacaacatcacaaataagagagaaggcagaattttaaagacgtaaagactatcgtctctgactcaatatacctgtacttagtttatggtcttatcccaaagctttatacatctaggtagagagtaagtgtaaactcctcaatgcttaatgtttaagaagattttattgctgtaacctaagcattgggtttcaacatttcactcatttctggtcgtctttttgtttcttttgtgagactgacaataggtggataatcttgggagagacagatgcttcttttttaaagcaatcaattgtcacattccatctataaagggaaaggaattactaaagagtaaataatggttttattatttttgcatttactatgtaacaattgatatttattgttttttaatccatttagtatcctgtgatttaattaacactctgaattctatagatgtgcatacacacatatatagaaaaaatatatactgagttttagtgtcatggttaactttaatagaaagattcaacagaagctataaaatgaagatgaatgattaggatagtttgctatgtttttattagagtatgaaattgtagtttatttctattttttaatgacgggagtgtattctgaatctataatttccctggctttgtatctgaataggtcttgatggggaacagacagtctacttggaagaggtaattagagaggaattaatgaatgaactattaatgcaaaggtgtaggcagattagagagaaacaataagtaagagaaatattcaaggactcaccaagccaggaacctatgcgcctttagatatgagggaccaccggaagggagcttatgtctcgactagacacatagagtgctcagattaaacattatttctgagtgtgtttctgagggtgttttcagatgagattagcatttgaatcgagtggactcagtaaagtagattttcttccccagtgtgaatggatatcatgcgatctacaatccattgagggcctgtatgacacaaaaagctaaggaaggataaatttaccctttttgcttcctgcctgccgacttgagctagaacatctcatttgatcttttctggcacttggactggaatttggatgccctggttcttgggcctttgcactagaactaaattatactattagctttcctgaatctcctacttgcattaggcagatcatgagaattcccagccctcttagttgcatgagaaaattcctcataataaatctctctctctctatatatatatgtgtgtgtatgtgtgtgtgtgtatatgcatatatttctttatgtacatattttttctcaccttatcctccttccgcctcctcctccttccttcttcctcctcctactgctgctgctactgtttctcctcctcctcctcctcctcctccattgccgctcctccccctcccctcccccctccctcccctcctcctcctcttcttcttctcctcctcctcctcctccctcttcttctccctcttcttcttccccctccctcctcatcttttacatcttccttatcataatctcctaccagttatatttctctgaggaactctaatagagagctatttccagatgcagatcagtcttggaaatgctgctcttcctaggtggaagaacacagtcaatacataccaaacttagcatgaaggcactagattttaaaatgttctaattttgttctagtatgtgttttgtgcctcttattggctaaatccaactagaggctagattgcaagggagtactgctgatgcaggtcacagaagtcagccttgcagaattcagtgatgaccccacagtatgaataaacttggcaatcctttacttcttagcgatttgtattaagtctttgagttacaaatttttagtacaggcaaaatagtatattggtaaaataataataatgccataatttctcaattatgctccaatcttaagctacatttcttccattctatagtaactgcactagtatttggagcagtaacataatttagatgtaccattattccatttccaaaaatgttggtggtctttcatctgtgtcagcattatggacagtaatagagcatttagaaaaaaaaatgaaaaatcttagaagagattttattttcaacacaagctatcaatgtagcattggataagctctttattttctttaaacattcagttccaactctataaaacaaaaatttggaccaaatggtatggaagttgaacaattatatatactttcatgatctgagatgaaaatgttcatttatctctagaattgttttagaggtaaagcatgttcaattcaatacatgcccacttgaaacacagagttaaataaaagatcttgttgctatcataaaactgtatctttcatatgaaaaatataaacaatgaaatattggatacttgaatttaaattttggttcctctgcttttgacttttctgcttttaaaataagtcagatgtgtggttataagaaggattggaaaagttgagctgacaagccaagttgccctgagtccaatttttgaagaactgtgaacacttcaaataaatggttattgccatttgtaaatcactgggtaaaaacaagaataatatttatgacacatgaaaattatatgcattttaaattttactgttcataagtaaagttttattggaacactgccacagttatttgtttatatgctgtctgtgattgcctccatgccaccacacagaattgagtagctgtgacagcaactgtgtgagcctcaaagtctatcatttttactgtctggctatttacagaaagtttgctttcccctgagatatactgaaacaagaagaatctatgttcaaagggaaaacgacataaatgagctaggtcatctgaaggtctggagactggaaagaaaacataattagaaaggtctaatgtaaaaggcaagttattctaggatgtatgtgtgtatgtttgtgtgttttgattatgaactatgaagatctttggcccactgaatacaaagtcagcagtatttgccaacacttgcagaaagtgatcctcaggatttgagattgccttggaacgtattcttaaatattctcaaaataactgactttcaagtgtacttgtctcattcccacagggcagatcccttttgtacttgggttataaattcatgaagaattcttagtcatcccaaaaagagtgactaagtaagacaaccatcatatgtttgctctctttgtagtttagaattgcaagggaataattctgaggttattggaaggtggttcgttttttcccaccctcccttccttccttcctttcttcctttcttcctttcttcctttcttccttcttccttcttccttcttctttcttgcattccagcaagggaaatgaaatacatagaaaggaggaatagctcgaagaactaatagcctgcctggagttgagtactggaatgagtatatgggaagaatggagatgaacctagataaacctacttcttatttttatggagtaaacaaaagtggaaatattcaaatacaaaaataatcagttgacattgaacaagtaaaaccctatttttaggcttttaatagtcagttaacattgaacaagtaaaaggagttgctgattatttttattattattattattttttttttgagatggagtctcgctctattgcccaggctggagtgcagtggcatgatcttggctcccaacctgatatggtttggctatgtccccacccaaatcgcatcttgaattgtagctcccataattcccatgtgtagtgggaaggacccggtgggaggtaattggatcatgggggcaggtgtttcccatgctgttctcatgatagtgaataagtctcatgagatctgatggttttataaaggggagttctcctacaaaaactctattgcctgccaccatgtaagatgtgcctttgcttctcttttgccttccaccatgattgtgaggcctctttatggaactgtgagttcattaaacctctttcctttataaattatgccctcttgggtatgtctttattagcagcgtgagaacagactaatacacaacctaattagcatcatgttttaggaagttatgtgttcagtgaatacacttattttttcttttcttttcttttcttttttctgagacagagtgttgctctgtcacccatgctggagtgcaatggcacagtctcggctgactgcaacctccgcctcctgggttcaagcagttctcctgcctcagcctcctgagtagctgggattacaggcacccgccaccacacccagctaatttttgtatttttagtagagagggggtttcaccatgttggccaggctggtctcgaactcctgacctcgtgatccacccaccttggcctcccaaagttctgggattacaggggtgagccactgcacccagccagtgaatacacatttatttatttatgtatttatttttgagatgaagtctcgctgtctcccaggctggactgcagtggcgtaatctcggctcactgcaagctctgcccccccgggttcacgccattctcctgcctcagcctcccgagtagctgggactacaggcacccgccaccacgaccggctaattttttttttgtatttttagtagagacggggtttcaccgtgtttgccaggatggtctcgatctcctgacctcgtgatccgcctgccttggcctcccaaagtgctggggttacaggtgtaagccactgcgcccggcccaatgaatacactttttaagcatttggttcattataagtgatttacatttatcctatggactaaattccatcttttactcaagatggacccaagaactaagcatcagataggtttggaaattgtaattttttacagcctgttgactatatctcttctgaaatgaaacaacattataagaaagtgatggtttggtattaataaaataatgtatttgaaagcatttgaaaaattatgaagtatacttatgaatataagtataaaggattattactatcatcatcataatcatcatcataattattgtaaccatcagggtacaggagctggcatacagtgtttgccctgttgtgtgagctttgaacttttttgagttatgattagtgtagattgggcaaaatagaacttccagcctggaacttattaagcttactaatgtaatatacctgaaacaaggttcacagttcaagcaattatattccttgaacaaacagtgggtattctgacaggagggatgggcactgttgagttaacttgggggaactcaggaaagtgaaaacattcttgtgatttccttttggaaccaactgtgctcttcatgggagatggagaaaggagttgagtacaaccttagcctaacccacaattccagcatttagggcttcacaactcaccagtagggaggtggttttctagcaaacgagaccaacataaattctcaagttcgatttcattctaaaaggtcagtggcaacgataatagcttacatcttccttggagacaagagaggtggacaattccaatgttatgtaggtaaagacacacaccactaccagaggagaaaagttccatgctagtcagttgtgattcattaatgatatgaaataaagaacagatggggaaaaaaggttctttactcaaatgaagtaaaaattacgttgacagtaatcagaagtaatgaaagaccagagggagaagtacttttctcttagcttaaaaaggaaattttaatttccacctgtaattcaagagtcagggaaacaacatcctcttgtctcttgtttagaggcaaaggggacactaccacattctttcagtatcatttccttcaatcttcatcttcaccttatctttccactggattacgaactcctttcccagggctttctcccattggcatgtaaacatagtcaagtctcctttattagaaaaagattaaagaaaaagggaagactctttaccaatgccatattttcttcagatattggtctctcctttcctttagagccaatttcccttttttcccccaaatttacatatttcttggaagaaatatctataatcactttctatacttccacaactttcaatatcttctttttaacttactgtcttctgtccccctctctccaatctactgaaactactatttccaaggtcaatagcatcactatattaagaggaaaacccttttttaaagtggctatacctacttatatgcccaccagcaatgggtgattcatccagtctcttcaacctcaccagcatttggtggtgttactatttttatttctgttttaggcatccttataggtgtgtgggaagatctcattgtagttttccttgcatttccataatagctcctgttgtagaacacctttttatgggttatttgccctcagtgtatcctctttttgacattttttttaaatttgatttttccataagttattggggtacaggtggtatttggttacatgagtaagttctttagtgttgatttgtgagattttggtgcacccataatctgagcagtatacactgcattttatttcatcccttctcctcctcactctcctccacaagtccccaaagtctgttgcatcattcttaagcctttgtgtcctcatagcttagctcccacaatgtgataccaccttaatcctgcaagaatggccataatcaaaacatatcctctttattaaactgtcttttcatgtatttgctcattttctatttgcattgtttttttactcgagatttgagagttttggatatattctagatgctaaaatgtcacacatacgatttgcaaatatttcctctcagtcatttatagatgacttaaagatgttttaaattttgacaaaatgcgatttattattttttcattttatgattgtcaagtctttaccttttttttacattgctctcttttctttttccttcgtttctatgagttactggtacatttaagttttagaattcctgtttgatttatttatagtatttttcagtgtatctctttatgtacagcttttttcatggttgctctaggtatcgcattctatatacacagcttatcacaatcgaatcatcttactttaccagttcaggtggagcacacaaaccttacctgccttcatgcccctttacctttcccatttataatataattctcataatcattttctctatacacatttagaagcacatcagacaatgctagaatttgtgcattcattatcaaatataatttagaaaattctacaggagaagtaaggtctattctataacccttgttttgcttatcatgttctttcttcttcatattccaagtttcttttatcgtttcctctctgataacttcctttagctattcttttagggaagagctgctggtggcaggttttcttagtttttcttcatctgagaatgttatgatttcccttcaattcctgaaagatactttccctggataaaggattctctgttgtcagatcttttctctcaacacttgaaaaatattgtgtcacttcccctggccttcatgatttctcatgagaaatctacagtcatttgaattgtcttcacctacacataaagtacatttttcttttactgcttttaagatttgttctttgtctttggttttcagaaatttgactatggtatgtcttggtatggatttctttggttttaatcttatctggagttcacttagctgttggaaactttaggtttgtatctttcaccaaatttggaaattttttagacattatttcttcaagtacttttgcagctccaccgttttcctcttcttctgggactcaaatgacctaaaagtgaaatgtttggttttgattcctcagatgcccaaagctgctgcttcttctgtctatttactgtctgttgttcagattgagtaatgtctattgttcttttgttaagtttactaattctttcatgtttttctcccccgatgttgcgtatattttctgagttttaaaaaatgtttggttattacgtttttaattcaaacattttcacttggtttttctttatatatctagttctttgcttaggcattttatgtctttgaggaaactttctatttaaaaaaatgtttctagtatgttagcggttgctcattgaagcattcttatgatgactaatatctttgtgagataattctaacatctttttcatcttggttttggcacttattgcccctttctattcacattttgattatcctgcttctgagaatgatgggtgttttcagttgaaacctggccatttggggaatgttgtgaaactctcaatctaaattaactgtctcattttagcttgcttcctctgccacttctttggcaggcaaaaaagggaagctacctcattactgccaggtagaggtaagagtccggtttccccactcagccttcactgataactaagctggaccaggatggggttctggctccccactagccctctacagatacatccttggcttggtacagaaggtgtgccatgtgaatgatccccagtggtctccagtggtacccctgaatgcagatggtctccttgctgtcaccagtagtgaaaattttgacattctagtaggcctctgacagtgtccagccaagtgaatatggggtgcctcattattttcaggtggagatggaagtccaggccccccacatagtctccactgacactgcaggaagaagagggatgaaaattctggcctcccacttggtcttctttgacatcaccatggtggggtattccggtaccttattacaacctgttgagtgggaaagtctgggctccccacctggccttcgctgctgagtgggagtgaagacagagtttttttccgtggtatttggctggagtagagaaattattatctaaaagttttctgtcttgtttggctgctcctaccaccatcctttggccagagacagcaggctttggttgggacttttcttgcctgtgtctttgctattttgggatttgcagtttcttcagcaacaagtctgttgcatatgagtcaaaaagaaaacttagggaactcaccgccttgttttctcttgggtgccaagatccctagtttgtctgccttctctctaccattcatagttttactactttgttttatttataatgtccatcatttttagttttaattaatgcaggaaaatggactttgtcttcctaaaagtgggtttctttacaaatagataaaattttactctggcttttcatcagagtgcatcttatttctttttcttgactaatattcctgactagaatatctagttcacctttaaatagaaatgatgaaggcagatatctttgtcttattcctggtcatagagaaaaatcatccacccttttgatattaagtatgttagctgtgggttttgtggatactctttatccacttgtaaggggttatttttatttctcatttgatgagtgtttttattatacaaagacgttggattttgtcaaatgccttttctgcagctatggaaatggtcatgtcgacatctgtcctttattctactaatatgatatattataatcatggttatggtttgttacagcaagaagacaaagattaaaatcaaccaagaaaaggtacaaaggactaagtgcaagagaaaccagacacaaacatccagccatgctctcccagtggaatcacacagacaatgcctaatcctcctagcagtgatgtgtgcagtgctgccagccagggaagctcgcctgaactttaatgtcagagttttattggagattagtcacataggaatggaggacccatgtgactgaccttagctattcagcctccaactcctctctatatcctgccacaggtcaaggaaatacaacattattcaaaggcactgacacacgaaaataggggttcaccgtaaatcatactgttagcaccaaccatctggtgtgacccaaagtctcagatacacaaatacactcttaacaggcaggatattcccagggctcagaggcaacctcctagaagccagtttggagtcaatcctttatttagaatgtgtagggtttgaaagcacctgcctgctatgttaacccttcatggtataggtatcactcccttcttggaaacactatctttccttagatgctgtgatattcttttctttttttaaaatcacttctgaatactccctatcaccctttaaatcacaacccttaaattttgatatttctctgggttttgtaccaggtcctcgtctgttctcattttataaaatcccaggacttggcaggataattttcttccatttattcaagtgttgtctatatgctaatgatatccagtcacttatatctctgaccaacatattaaaccacccatcagcatatccaccagcatgtttaacattcaccttcccaggtatctaaaactcaccatattctaaagtgaactcattagcattcctctaaaatcttgctcctttatgttagtgaataatacctataatcactgagctatttaaaccagaaatcttgatgtcacccttgaaataaactctctccttcacccacatatctaatgtcttgtataatgcagttgatggatttctttccatgtcttcaattcccactcccacatcctgattacagacaccacaatcctttggaaggaagattgccagcaaccagtcatccttactggaatgtaggtaagaatgactagagtaacatgaagccaaaccaccaaaatgcgttcagagcaatctttccaaaaagcaagcctaacaatgttacctcctactcttaacccccaccttagtttaacaatcttccagtggctccagtttccttgagatgaattccaaacttcagactcaacatggcactatgtgtcacagttggacccttcttatctcttcaacttgatttcttctcactttctgcagatattctacatactttaagcaatggaagagcttctttcagttgctttattcggccttttcacatgtcaatcatccttctaaaaaactgtttcctgcccagcagccattccggtgattaactcctatggatttttcaagtcttgatctttaccgcctttaggaatactttcctgacattccttcaaacctgggtttggagcctaccctgggcattgacctggtacctgctacctctcttatcaaagtacggatagattatatgttattttttcttggtttatctttatccctcatttgactagcagttctaaggtcttctctgctattataccctatgtccagaaatactcctgaaaaatatcaatgccacataaatatttgctgagtaactgctttcttttatttttacattaagaaagttgtatatgatctttggagtaaatagactttaagacaagggctggggttggtgtgaatcagagaattacagaccataaatatattagaatttttgaagacattttccccattacaatatgagtgtcttgagagagtccttgtgacagtgactataatgccccagtataaccttgtatgccctgcctcctggccaaaaatttcactcctgtgtcctatacatggaagacactctataaatgctgctttaattgaatttaattatttgaattttatatctactcaattatatgctatgatataccctttgcaaatgtagctcaaatcactgacgataaaggtgactttagccactggactcagacttcagtattcatggagagaatgccagactgaggagcataattcagacaggacgtattttagatcagaacagggtacagtatatttgactttttagttgctgctggagaccctctcttctgaaagaaaacagggatccttgatagagccaggattaaggtaaggcaagcgagtgttcactccgcagcacaaaatttcaggagcaccaaatactcagtaatccagataaataatacttaatgaaatcatttttaaaaatcaaaattaatgcaaaaatttatgatgaacaagctacatatttaaaataaagacaaacgatttcatgagctgccattatcgtcttgtcgcagcctgcagttggttcctgggcctgcattcaccatcacatcccccactggtgggctcttgggaattgacaatggcgtgggaacagatcaggcacacagagctttgtatgtcatcgtggttttttcttattgttgtacagctttcattaactttttttacttgctttgaaatatgggaggatatttgataactgtatgaaaaagtacacatttttcctttgtctcaggctccaacagggttatggagtcactgtctttggaaatatccattagacattatataatgagaagcaaaagacaaaacacagccagtccgtctgaacttcatggaagggggttctaaccaaggtcagaatcaagtctgagaataacgcgtgggtacacaccttctttgtcagcttcatccacggaaaaacctgtaaagctaagcaaagttgattgcctaaagcagccactttttctaaaagcaaaggaaatggcagtaaaatttttcttttgcatgctgctctccccacatcactgcccagcagatgtcattgaagtagaggaggttgggatgattttaaaattttcattgtgcacatttttagatgttagtttttaaggtataaataataacacctctgtgtctaccagacttctaaaataaattattgtccttcccgttgaagtctctgtgttcacgaatcacttctttctctctgccttgacacactgagagatattcactggatttgttttcattattagacttttcctaatgagaagtaagcttcctcagcaatacatgaaatagttttgcatattttaatatgtatacatggcataatctgtacatactcttcttcaacttgcagttttttcatttgacattttgaaaaatatactattaatacatgaagctttgggtcacttatttctaatttctgtatactattccaatgtgtgaatactcccaacttaatttatccattctcctattgatgggcttttaattttttgatatcttttctatgatgcaaatgctgctacagacatttttgaattttttttaattcaggatcaacaactcagaagacaattgctgagttgtgaatattcatgtcagctttactaaatattacttaactgacttccaaagtatttgtaccaatttacacccctaccagcagcgtatacgaatttcccagtgtaatatccttgcctatagatggtatttggactgttaaaggttttttgctcattagtaggatataaaatgggttttcacttcaattttaatgtgcatgtctccaattacaataaaattaacccagctttttaaataatttcaactttagttttagatttaggcggcatatgtgtggatttgttacatccgtatattgagtgatgctgaggtttggagtatgattaatcccatcacccaggtggtgatcatagtactcagtagttagttttcaactcttaccctcctctttctcacccctctagtattccccagtgtctgtttttcccatctttgtgtccacgagtagttgatcttttgctcccacttataagtgagagcaaacttttaaacttttaagacatattttgataaacagaatattttaattttagtgtagtcaatttaatatatgatatataagatatggtttgtgttttatcgcattttacattaaaaattcttctctgcctccaaatcacaaatatagttccatatatttccttgtaagatgaagttcaattcctctatgtctgtttattcaactttattttttaaatgataactaatgttctaaataccattgagtgcaattacagttcagtatcagacattgaacttcaaaatatgtctggatattttcctgggctccattttctattcaattaatcttttatctctttccaagccagtactgcactcatagttcttgtagctggattcaggaaaaaaaaatcactttgtcttattaatctgaatggtcttggctactttgataatttggcgtcttagtttgttttgtgttgccataacacagtacctgaggctggataatttatagagaaatgaggctaatttggtttatgattctggtggccagaacatacctgtctgagttgttgcttctggtgagggacttatgctgcttccaatcttggtggaaaaaggaatgggaacaggtgtgtgcaaagagattacatggccagagagggaaaaaaaagagaaaccaaggaagttaggctcttttaacaatccactctcaaagaaataagtcattcctgagagagcaagaactcactcactcccagggaaggcattaatccgtttatgaaggatccacccccacaacccaaacccctcccactagactccacttcccaactcaactccgccacattggggatgcaatttcaacatgagttttggcagggacaaatcacatccaaaccatagcatttggttttccgtatgacccctataattcctagagttagtctgtcaaattataagaacaatgctatagagacttttactaaaattgcattaaaatttgtttaacttggagacatctaacatctttatgctaatgatttttctctatccatatatatgttatatcttaccatttatttaggtcttctacctgatttgttcataacaatttgaaattttacatatattagacataaattcttttcttagatttttttctcacatattcataattttacttgctattttgaatgttttctttttaaattttatttttggccattgctagtgcataggattttttttacagagatctcatacgcagtaaccttgtcaaactcatatatctttacttactataaacatatctaagtttcctgccctttcactcgtaattctctattatctatttatagcataatggtggaaaagattagttttagaaaaagaatggagcaataagaaacagaggatagggccaagactctattttgacatgtgaatgcagtgtggcctggagaaaattatacatttttttctggattataattttaaaattttttagttatctcatctgtacctcaaatatgttaaatagtatccatgatttgttgtgtgagcaggaaataagctaacaaatacaaaatacttagcacttaataacggcttcataaatgttaactgctattgttattattgtgttattaattcttatttctagcagatgtcccagtcattttacaagtgcaaacatttgtaacatatcttgaaactggggacattaagtgccagcttaatctatgtcagagtttctcaatcttggtatcattaacgttctaggcgaggtaattctttatggttgagagaggggtatcctgtgcattgtatgtttagcagcacaactggcctttacccactaaatgccagcagcacttcatcttcctcctttaccacggtgatatcaacccaaatctcaagaccttgccaaatgtctcttggggaacaaaagacactggtctacgtaaatatcctgtctctctgttgctgtctctctccccaccagccccataaataccccaaactacacatagtacatttctctataatatccttgaatctcctccatccagtcttgcctccctatgcccttctctcatcttgaagggcagtagttcagtagtaccttttggcaggaagccaggaactgcaaagctctggccagtaggagaatgtctgacccttatgtttaaatccacattagcaccgcaggccccgtgagagagtaaatgggaggagaggctgtcttctttcagagctagctggtaggtggtctgtttgcctttgttccagccctatgcagttctctcctgtgtttcaaaccacagcctgctgggctttgtaaatgtagcagtctttggtagaagatctgatctttcaaattatggaacctgggctctttttaaaaaaaaaaaaaaaaaaaaaaaccttcaacatagcaaatcagattgtactttgagatgaataatgaggagtccaaggaaagggtttcagaatcctgaaaggagcaattaaaaataatgagtattgagaataaagcattattctcaaagaggaaacataagagccagtcagaacacttcagctgtgcttggggtatgtttagccactttaaacagcataaaacactaaaatgctttaccttgatgaaatgtatgtgcagcaaaaaggagcagagattcttactttttcctctaggttgcgttactactgtgtatgctgtatgcttagccacaaactccaattgctgagtaataattgatgagtgcttacttcttaaatcaaatgacccctccagcctcttttccacctggcctggtggtgcaggtgcatctggtgctcacatgcccctgttgctgagtcaactacccagagcctctcgtcaacattgctgccacccttgggaaggtcagcaatgattggcaatgctcaggtaacaaaggcacattgcctcttcccatgacacttttactctttgcactgcaatttccagtttttcaaaaattttcccttgcttgcattcctctattttctatctctaccctgagctttttcatagcggattcggagaccacaaagatctcttctcaggagaaactctgtggaggtaggcacctctaaccctgtttatttgtttttgctctgaaataattccttctaaataaattatttacatttctttttgctacatcccaccttttctcaatatacattccagcacgactttcttcccaacattatccaaacattgggacatcaacatttactgagaaaaactttcagagaagaattgcacccgataagttaaacaggcaaggaagatttattcaagactattgcaatatggaagagagattgaactcaacaccactgaagcaaaaggtgggagagtttttaagcattgaggtgaactatggggaaagcaatgtggggcctcagggccaaggatgatcaaaatcattaggctatgtgtttttgctaattggcacttatctaagttaggatcctgccctcccagagagaggaggaggagatagggtcttcatcttttgtaatgatagcatttccaagaaatgactcccaagcccttgagaaagggatttctgggttgtaaaaatggcaagaggctgaaagatgatttacatctcaaaaagacagagaaaaatgtacagttgcaagttcttttttttaatccaatgcttcaagtaaaggaaaggcatagatatagagtgagatgctgttagatgaggtaatatgacatcatcttaagggccactaaaaacctgactctaggattcaccaagtcctaggattgtattctgtctctgccaggtatttgatgtatagattttaaggctcattttcctctatacaatgggaacaatagtagaactatttccatggtagccatggaatagaatgagatattataactacagtcattccagtaatttgctaatcattcttctgatgatttagttagggagttagagcttttaaaagatagctgtttgttttattgtaagaaaatatacctgagacctctgttgagaggagtcaggaagggagactattttagcatctgtttcacaaaaatgatacctgaacttttgtaaaaaagaaaaaatcttcgaacacttaaagatctccattccctttttttgtcatgaaataaataaattgtccactagaaagttggtaaacaaagcagtagcagattgtaaactctaaatgcatagtgaatttccatgtttaggaattcatgccctccaaataatcatagatttatataatcatacagctaaggatatattaattgcagtattatttctctaaaatgtattgaagcataatatatacacagtaaagtatacaaatcagatgtacacagttcaaattattttcacaaagtgaataaatgtgttcacccagctcaagatacagaacaactctgcctcccagaagttttcctcaagtcccaagcccatcagttccatcccaaaagtaaccatactgtgactctattcagcataaattggttttgcatggtttaaaatttacataaatggaataaaaataattagtaggaaactctaatatctactactttcacttataaattttataaaacgtatccatactgctacatggaaaagtaatgtgttctttctcatttctgcatagtattccattgtacacacataacatagttgacattttttctgctgcgtgcatatagccaggagtggatttgctgtgttactgtatatgcatatgttcaattttaataggtaataccaaagtggttttactaattgacacccccgtgctttttcaaacattttgtgtattctgtcttttgaattttagacatcctattggctgttaattttcattttcctaatgacaatcctgttgagtgtctttgtaggcactgtggttcaggattcactccattgtgaattacctgatcaaatattttgctgggtgtctcttgcttttcctactgatgtgttgttgatttttatatatttgaatcacaaagtatttttcagagctaagtaataacaatttgttctctcactttgagtcttgaaattttctccctaaataatgtttttgatgaatagtcttttcctttataatcaatgtgtttcatgtctggttgaaaatatctttgcctaccttcagatcatgaaggtactcttctacattttacttgtagtattatttataatagaaaattatgaaaacatgctaaatacctagccacaaagaactgacttgaaaatcatacatacccatgtcatgtagtaataggaacccactttaaagcctatggaataatacatgatgaaatgagaagtgtttatcacatattgtagtttgagaaaagcaggttatgaaagatgtgaaatttgatataatttttgaagaatgcatacagaataaagactgtacgaatacatttttaaagtaattatctgggggtggtgataatataaattatcattcttttatttttgctaatttacattggcaatatttatataagcacatgttcctgtgctataatacaagatagaatctgttaaaactaagggacagtgacatcaaatttgaaaataaatattttattcaattttatagcttgttaatggtaaaatgtgaggtaaatattaggttattatttaaccaatacaccgtcctatgtctgaaggtgttcataatcacagatgcagaatacagggtgttgagaccaatttgatattttattagtcaaatcaaaaatttaacaatgtttataggttctcatcagtgataattatctgctgcctgctgacgcctgcatttttatcaattggctacagtccaatatgcaactgcatatttaattagcatgtccatttattctcatagtgagccagtgagagtgtagataatacagaggttttctaccaacaaacatagtcactctgactttatagcttataagttggaatgaggagacccaatgggtatgattctcttgagaatttctctcctttggaaaacctttttttgagaaagtggaagggaatgatgtaattaatgggataattctcaccctggggacacttgggtttttcttcatgctattcacaaattatagaaagtcaaaaaggtccctgtaaatttgttgaccaagaatcgtattacgtccaaaatatctccctcaagtttaactttacttgactatcaggagattgctttattcactttaggtttgacctttgtttttaattcatctcatctttaattccttttatatatcaactcaaaaagaatgaaagcattcaatcctgaaccttcctcaaacggggtgatttagcgaatgctaatggcaattagcagtcccaattagtatttatgcattccacatgaatacaagaaatagtaccatgccagatgcttttctctatgcagagggttagtgtagggaataagaaggagatagattaaatctctgtcctcaagaaacatgtattcatttagggtgacagagagaaaataagtaaacaaagtaataggtcacaggaacttaactctcttttatataaatttgcctatggtcagattttcatttcacttaaagcctaagtttttaagaacccatggacaatgtcaagtgaggacttactggacaaggtaactaggtcacagctatgattaatgtagcaagagccatgaggccacattttttctttaagccagaactttcctctgtctcagaaagaagccaatggtgttctaatcatgaaagtggttagaattaaaatggagtcatttaagctaacctgtagtcccagctactcaggacgctgcagtaggggattgcttgagctcaggagtttgaggccagcctgggcaacatagcaagaaatagtgccacatatctacaactatctgatctttgacaaacctgacaaaaacaagaaatggggaaagtattccctatttaataaatggtgctggggaaactggctagccataagtagaaagctgaaactggatcccttccttacaccttatacaaaaattaattcaagatggattaaagacttaactgttagacctaaaaccataaaaaccctagaagaaaacctaggcaatcccattcaggacataggcatgggcaaggacttcatgtctaaaacaccaaaagcaatggcaacaaaagacaaaattgacaaatgggatctaattaaactaaagagcttctgcacagcaaaagaaactaccatcagagtgaacaggtaacctacagaatgggagaaaatttttgcaatctactcatctgacaaagggctaatatccagaatctacaacgaactcaaacaaatttacaagaaaaaaacaaacaaccccatcaacaagtgggcaaaggatatgaacagacacttctcaagagaagacatttatgcagccaaaagacacatgaaaaaatgctcatcatcactggccatcagagaaatgcaaatcaaaaccacagtgagatagcatctcatgccagttagaatggcgatcattaaaaagtcaggaaacaacaggtactggagaggatgtggagaaatatgaacacttttacactgttggagggactgtaaactagttcaaccattgtggaagtcaatgtggcgactcctcagggatctagaactagaaataccatttgactcagccatcccattactgggtatatacccaaaggattataaatcatgctgctataaagacacgtgcacacatatgtttattgcggcactattcacaatagcaaagacttggaaccaacccaaatgtccaacaatgatagactggattaagaaaatgtggcacatatccaccatggaatactatgcagccataaaaaatgatgagttcatgtcctttgtagggacatggatgaagctggaaaccatcattctcagcaaacgatcgcaaggacaaaaaaccaaacaccgcatgttctcactcataggtgggaattgaacaatgagaacacatggacacaggaaggaaaacatcacacaccggggcctgttgtggggtgggggaaggggagagcgatagcattaggagatatacctattgctaaatgacaagttaatgtgtgcagcacaccaacatggcacatgtatacatatgtaacaaacctgcacattgtgcacatgtaccctaaaacttaaaagtgtaattaaaaaaagaccctatttccaaaaaaaaaaaaaaatgaaggccttagtatttttataaaccctgacaaacaggatctgagaaggctgtgaagagaagggtcttatacttgtatgcctcacaaaactatcacagaaaactctaatgaaaccaaaatcctgcacaaaggttgttgcaaccttacacaagaaataactgggcaagcacatctgtccaacagctgcctgtccaatctcagactggtgtcatcattgttattgattcttgtagccaaggataattatttttaaaccattatgtaatcctcttcattttttctttaaaaacttttgtctttctttgcctccctaaataagcacattatttacaatgacatgtgcactcccattgtaaggttctcttcccaaataaacatcattttcttttagagagtctcactctatatttatttatttattttgaaactggaccttgctctgtcacccaggctggcgtgcagtgatgcaatcatagctcaccgcaacctggacctcctgggctcaagcagtactcctccctcagcttcctaagaagccgggactataggtgctcaccaccacaccctgcctgtatttgttatttaggttgacgtaagaaatatgaagaaccaaagaatcctgtcacaacttttcttattcatgttactttcctgaactggacaaacactcatgatggaaatgatgacctagaaggaaacagaaagacagggaaaagcatagttccttttccttcctgccccttcttacttatcagtaaactgaaagtaagtggtattggtagagcatgtgcttgaaataaagacagctgagtgaggtagtttcctacagtgatatccgctatccttgtaagaacaaactacatctgcatgtattaactacaaaatacaaattttgtaataattttggtggttctgcatagaagctaaatgctcaaatatttgcatctaaaactgtcattgcataatataaaaaagaatagttaaattcatattaataatttttatttgattattttattttcctttcaaatagtattaaataacaaatgaaaaaacacactatgacaagtcaaaggagagattatggaatatcagaaaaagcttcatagttaagtacctttagctacacttacttttggctttttgaataaaagactccacattttcattttgccctagaatctgcaaattatgtatctggttctgcctgtggaaaacaggatccaactcagagagttcaataaactttagtgaagaaactaaataaatttgggcagaaggcagggaactggcagggatttaaagcactgagactagcaacagtgaagagtcattaccaccctggacctgaagaagcaggggataacatattttcatctcagactatgagagtgagtagttgggaaaaacacatcctgacctctgtctcccctgcccttggatctctttcctgtactttcctttggcaaacccaactggaagccagccatctagggagcctggggcatgcggtccatggggtcagggcaataaaacatgtcagtgaagggcaaagaaagtatctgaggtgaaggcaagttgagtataactgtggcacagtgaaaaataaatatttgatctctgaccccagttttgggcacaaagcccctaaaatccttcaagtctccagagtgataatagtatcttttgaatgttcctagcaaggatctctaaatagcttcagaattgggggctggttgccagattaaagggttgaaactttcagccccaccctgccccctttgggggaagggggaaggtctggagattgagatcagtcaccaatggccaatgatgtaatcaatcatgcctacctaatgaaaccttcatcaaaacccttaaaagggttttgaagcgcttctaggttggtgagcacctcaaagtgctaggaggcatggaagaagctctgcgtctctccccaccaaaccttgccctatatatgtcttccctttgtgtgtttctgaattgcatccactataataaaccactaggtataaatgcagtgttttcctgagttctgtgagtcattcttgtaaactatcaaactggaggagggaagggagactgatatggaaatgcaggaacttgtagttggccaggcagaagtgtgaggagcctaggtaccctgtttgcagccagcatctaaattgagggcaacttgtgggacttgagcaatctgtacagtccagatagttagtgtcagaattgaatagaattgttggacaccaagttgacattggagaattagttggtgttggaaaaaaacacctacccggtgtcaaatgtggtaccagaagtggtatctcctttttttttggttgatcatacctatctggaaaagtttataagaataagcaaacttggcacatgtgtccaaagatgaatcttcaaatttttaaatccaggtgttgccaagttatttaagccttactcattgttaactgagcataagctagataaatatgaaggcaggcaaaaaaccttcatacagtgactgccagggcatgactgtagtttgaaaggcttgtgaaaatcaaccttttctgtgtccaatagcataaatggagctcattaaaataagcctctttcaagttattgaatgtctgccaagaagacacctttgttctgaaaactctaagaaacctccttgtggttttagaagagaaattatacaaacccctgttataagtcccagatattctgtgtgtaataagaaaaaagggggaagggcagttgtactcggtagttgctatgcaacaatgcatgtggccattgctattttagatttaataacctttaacacatgcactttcttggacatgcagcgaatttacagcaagtagcgctcacgttgattctgcctcttcatctgaaatgccagtgccatgttaaatttgtggtccatgacataccagaggcctggcagttcaggttaatatactgctgaattcctacaatgtggaccttacagtgactgttaattgaaaagctgtgctcaatgtcaaattaatgtgccatggagttatgttttggcttaaatgcaaagccagataactaatctctgtctctcatatattagcagaatgctgagctcattattgcccttgtaaactggcaatattctctggaatgccagcctattgagccttcattaggaacagagggtgtccttcttcagtggcagtcgttttttctcttccacccaagtttaaccttgagaggggtgtgtgtgtgtgtgtgtgtgtgtgtgtgtgtgtagttggctaccccaaattaagttgtgtacattgtataccaagatcacgtattacaattattataattactggtagcacttatggagcaagtgcattatgcctagtactagtttaacctctttatattaatctcttatataatcttcaaaatagctcacaatatatggaacatatagccctatgctattagctatggaaaatagcagattatcagtaaatgctcgtcaaatgttcaatctgatgttagccactatgggggctattcctttctcttttgtcctgaaagccctccttctcccttattctggaatgtttacctcgatctcctcccatttactactatggtggtgggcatgtaacccaggttaggccaataatagtacctccctcttattaccaaaagttagctcataacccaagccaagccaatgaaagcccttcctagaagtgttcaaaattatttgaaggtgagaaaatgtcttttacgcccttctctgattgtgctgttattaacatgtaggattggggacaaaaatgagtaacccagggtgcttagggcatgaaatttaaggaggcattgactgtcagtgtcgtgcaagtgcaaagttgatacttgaaaataagtgtctccttaaattttctacccagtgtgtctgcctctctagccacagcctagttgcagccctgctaagatgtgaacctagaagtgccagtggcacttccttcagccacatgaagaactaatttcatttgaagagaatgaaatcaataagcaaagtaggtctgcctccaacatttgcagagcccaaggcaagaatacaaatgagcccacatctcatatatctaaatatttaaacattatcaataaggctgtaccaatagcccagctgacgtttgtgcctggagaccaacagacgctcccagaatcaccactcagagtccagaggttgaaggggctgcactcctctccactgacccgccagtattggtacgtgcaaacatgaggggcagtagagatcgctggggtagacaggcagagctggacagagcccaggacaggcaaaacccaggactcctggaaggtaagcgccccctgccccagaggactcacccaggactcaccctggccccgtcactgagaaagtgggataaggcatcaatgcaagagggttttctttccttacgtctcattttcctgacttagaatttccaggccattctagcatagcagttcagaataccagaggggaaagacaggtatacatatctgtagaatccagtctgtaataaaatgcaaagtagttttttttatatatatatatcagagcatcctatcttagtgtcccaggagagagcttaaatttttttctcctgtaattcctgtttcacaaaaatcaccaaacttacaaaaaaagaggtagttgaaagatatatatatatctttcaactacctcttttttttagtaactatctcttttttatgctgacctcagggtcagcataaagcagggcccctaaggcagaggtccctaagttactaagtgtaaactgacaggaccctaaggtgctgggtcttccaagtacaagatgtcttcaggcggccatcccttaagatattgggcttggttgcgcttagcaggcacacttttcatcctccatccctagaggctgagcaagctgagtcaactatgtggcccagaactcttaggcagtcgaagtgttccacttgcaatttgagagtaggggatgaggcttgaagaacaaacaggagctgtccaggtgaaatgcagtggggtggaaagggggagtccttgctaaccaaaaagactatcaggagaagagaatgtaaggcaagaaagagttcagcaaattcaaggaattgaaaagtgtcccatagagaaaagagcaagagagagagagagagagagagagagagagagagagagagaatgaatgtgactgtggaaattgacaggagcaccatcaagctggacttgcagcaccagtatatcattgatgggaagttatttaaggaaatgactcataagatctgacatagggtttcaaggctccgtctgtgggccggactcagctccagcttggaccagggctgtgacatagggcatgttgggatgcatgtgtttaatgtctgtcttctgtgtccaggttctgggaggatttcttacaggcattttctcccccaacttgtttctctctcagctgtcagttcaacctaactttatccatgacatggagcaggccagctacagcaggagggctttttatctccatgtgagattagtagcagacaagttccctgggtcacaaaaatggccagagagactgttggagttttaaaaatatccctttagaccaacttgtgcatgaaacgaactggaagaacaaagaaaacaaagctttggtaaatgtgaaaccccctcaacctctctactactcaggtatggttttaaaatgtcatactggaaacagctcaagaacaaaggctgcctctacccaagtaaaagaagtgtacatacaggataattatctgtccaaactcatctacaactatacctgagttatgtagataatgcaggcaaaaatatatttaattatccagataagattctggatgtcatgacttttatttgcatgtataaatagccatatgcagggtgttcgacgtcaggtttcagctttcagtttttttttcttcctaaagtgttgggagatatcttaagcagctcaaaattatcttactccaatatttatcagtcaaacacttcgctatggacaaagtgttaatagaggttctagcgggatatattatgggatttggaaatcttatcctaaagcaaacttcatctcaaaagatgagcttgtgcatgatttgatatatactccctcattcactttagaagaagccaaaggcaaatgtaaatagagataaaaatgaagaggcatttaaggcagacaaaggccaaatggccagcttttgtgttctgtattggaagggtggagtttcctggtattcaataaaaagactatttttattgaacaaatccacccaacagtgtagcctgcatcaattgaatccttccaatgaagagattagaattttatgctgtatctatattctagtgtgtatccatagggtgggattatcaaccactactgacattttggactggataaccgttggatacatggggagggagtgaggggctgtcctgtgtattgtaggatgcttagcagcatctctggtttatgtccactagattccagaagctcctaccaaccactagtcaggacaccaaatttatctcacagacctttccaactgtcttttgggtctaaaatcactcctggttgagaaacatggttgtagaggatattgagagatgtttgggcagccaaaccccaatttatttttaagaaattgactttggccatcaagataaattcatgaacctgttatttcattgcaagagaagaagggatccttgaaggttcatttagctaatgtcatagtctcatcaaccttagtagggacctgagaaggtcagaagatctaaccttagtcaatttggttatttgctagactctgaatcttaactggagttgtaccatgaatgaagaaatggtttgagctcaggactattgaatgagtcctcatgtttatgcctggttcttccaagtctggtttgatggctttcccttccaacttacgagccccgtcttattttattttaataagttgcaactaaggaaactttactgaaacagaccctttactttcagtttctcattgaatttagtaaaaacaatttaaaaactaaacaactaaaaatcaaatacaacaatagaaaatcaaaccattacgatcattttacacaatttaaaaaaccaaataaacagctgttttaatcaaacaataatcagttaagcctcatttgttaagctccaatgatttagttacttaaaacaacaaaaatatttacattatactaatgaaagtatttacttccaggatgctcaaattttaggtaacgaaactgaaagtttaaacaaaatcctttgccgaacctcaaaatacaaaaatgaattaaatatagcatttaattagtctacacttttgatttcacttatataatatttatacatttctaattacagcaatgctaacactaagcccttttgatacccaaacatatttaaaattttaaatttaaatagtttaattgatatttagggactttaattttcttcaacacccaaattttctctcttttgaaattctccatcttttcctgcaataaatcagtttctttctgtaggtcattttatcatctgtgccaattatcacctttcagcccaagtctacccttcagtgtctgctctgtaataatggaattgggccctgtagatttttctcctttgccggctgatactatgttaagctttttcagtagagacacctggagtgatactgagggagaaagcagtttgtcctcttggttctggcatgttctctcagtagtttctgcagcatgcagtgcttctgctgtgttcagcttcagcaatgcatacagccgctgcagggcatgtggttttgctgctctggttcctgcagtgtatgacatgaagcaaccagtagcatgtagcatctcctgtgaacagctttcctccggcaccccctcaggtggctttgcagtgagtactaaggcatgacactgccctgtagacagcttactctgacacccccagagagattcatagaggcccccacttgtgcaactcatcaacaaagttctccaggaaaccatgaccccagctcctctaatgaaggtcacagccgttgtgtgtagaggaactcttctatcaacactctagctcagcccaagaagtggtggctactttttatatttgttatttctgcattctttagaattatcttcatgcattactagccaatccctttttacccaagtctcttgttaaagtttaataatttctttatattgatgttttcatattcaaattaccagatggtttctgtttgctgattggatcctgatacatcatttttaaaatcaccaaactctttgctaattgcaatatgtgggtcatctatgagtaggtttttttcctgttgatttcatttttcctttgactctgaatcacagttttctttgtcttcagaaatctattgattttttattgttagtgggtattgtggataatactttgtggaagctctaaattctcttatcttccaaagaataatgaatctgaaagttttgccttagcaaacttccactaaattagtggaagatctctttgatattgtgcagctgtagtttaaagctgtggaactatatcgctgttaaacttagtcataaggtacatcccttaatcctagtatatggtccttacttttaatgcatgcatgaccattttgaataaaaagccatagtatgtattatgcctctcgaatttagcgggattttaactcaaaactctatctcctcaacattgggcaggagtctgctaaatttttttctttatgggtattttttgctgggatcttcacttggacattctggaagtcaataagtaatttaaggcaggtttgatacagaattggtgactcccccatttccagctacgctggtttttccaactaatagctctgattcctcaaaaaacatataaacatagatctcacccaatagaaccccttctttcaaggttttatctctttctatttctacctttctttttttctctctcctgtggtattagttatatagtgctgtgtacagacacatcccagaacttagtcgtttctaacagtcactgttcacttagctctcccttctgtgtgttagatgggaggttttcatctgagttgcctcagctgatttttaccaggctcacttgtgtacctgtgagagctgctgtttggattgtctcagatactcttactcacatatctggctggtggcaggttgtcaacagtggcaaataggccatatgtctcccatccaacaagctggtttgagtttcttcatctgacgatcacagtatttcaaaatagcaaaagggtaagtcttaatgaacaagtgcttttcacgcctctctttgtaccactttgttaatgtcccgtaggataaaagcaagtcacatagccaagccatgttcaaagagttgagaaatagactccaccttttgaagggaagagttatagcatcatattacaaggctgtggacacaagaggggaagaatttgtagcctcttatattatctatctgtcacaaattccttcaaaatattttttaaaattcaaagtttgtatttgtttttggaagttttattggtctaatacatcctattccaatattgccaataatatacttgctggttttttttttttttttttggagacggagtctcgctcagttgcccaggctggagtccagtggcgtgatcttggctcactgtaagctccgcctcccgggttcacgccattctcctgcctcagcctcctgagtagctgggactacaggcgcccaccaccacgcctggctaattttttgtatttttagtagagacggggtttcaccatgttagccaggatggtctcgatctcctgaccttgtgatctgcccgcctcggctatacttgctgggtttttaagtgaatgtagctgccatatatcatttactttcttatactgccttataagatctggttttgaatgtgcttacacagctgtctgtggtctggtataggcttggatattaaaggaaagtgtagcactacaaaagttctcattatgcctactatatggagaacatcttctatatacaagatttatcttgacaagtaagcctgatttaaaattccttcaagacaagctttgatattgtatgattcttaataaaaggtagtttggagagattaaaattatttccaattttgcataaagttagagttttagtataactgcatgactcagtttctgctaaaatgcaaccatgataatatattcacaatgatagtaaaaaaaatttattcccagagttgcataaaataaattaacctgacaatatgagtgagtacatttttgggtttcagtatgttatcccttggcatataatattagatggggcagaatatattattatatttaaaaaataatctaatcatattttaatgaattttaaataaaacacttgcacaatccttgaactatctgctgaaaggaacacagttttaaatcctctatttcatatgtagtctctgcctcaagagcatgaatttcttgagagtacaatcattgtcttattattgcactgtaaactcttagaaagaaatgattctcaatattttccttaactgaggcttaatcaaataataatgatgtattaacatctggctagtggcaagttaagttttggtactgaatggtgatttatgttacggtaaattctgtaagataggcaccataagtagcatcatttattattttatttaatgaccaccattgagcccatattatgaagccaggtgctgtctagtggatacaataaggaatactggatacttttcataagcatgtaacttacagtacagaaatggcaatacatataatcgttgaagtcacgattaactcatactttgccattgggcatgtaaaatggtgaagccactttggaaacagtttggcagtttcttaaaatgttagacattttaagacagtgtcaacccaagagaaataaaaacatatccacataaagacttatttgagaatatcagttaacagtactattcataatagttaaaaggtagaaacaatctaaatatccatcaactggtgaatggataagcaaaatgtggtataatccatacaatgaaacagcattcagcaataaagaggaacaaagtactgataccatcacagcacaaatgagcctccagaacattatcccaagtgaaagaagacagacacaaaaaccccacatgccacatgatccctctgatatgaaatgtccccctcaaaatggcaactcagggagatagaaggtagattagcaggtgcatggggaaggggatggggatgggaacagggagtgactgcaaatgagcatgaggtttcttctgagggtgatgaaaatgttttaaaattagaatggggtgatagttgcacagtcctgtaaagttattaattatcattgaattgctcactcaaatggatatattttatggtttgtaagctatatctccatcatgctatactgcttttaaaaatcatcattaagaagatgtggtatattttggagtgagagaacacatcctgggataagtagcctgagttacatctaaaggatgacaagagatactatgagaaattgctgtggtgatagtaggataagaaaaggttgcagagaggtttgaatcagcatgatgtgtgctgtgtgcatttgatatttgagtgtagaatctacattaatgtgtgatgcaatggagttcacagcagtaagagtgaggataggggtggagaaagtgtctagactatggagggcctgtgtgtcgtattccaaaggagagtttctgttctatagttgatgaagatattttaacaattgtaagcccgatcatcacctagttggcttttcatttcaaactaatcacaagggtggctgatcgtttatgtggggatggccaaggaaaggagagaagaaaactgtatcacaagggccctgctggaggcagggcgaccaattatgacattggtgaaatatttaagatgagatgtaatgatgattgccactaggaaagttgtcagaggaatggaaaacaaacactttttcggtaaaataggtagcgttggtgattggttagacatggggaataaaggtgagctaggaatcatgggtaaatttcaaaacttcgacttctgtggtgatatgtgatgattccaacaactgagagaatctgggaaaacgtattctaagaagaaagatgtgtatgggtcatcctggtggcaatgttttagcagaccactggaaatagtgtaagaaattacagataggagctttttttgtttttttgatggagtctcactctatcactcaggctggaatacaatggcatgatgtccactcagggcaacctccacctcccaggttcaagcaattctcctgcctcagcttcctgagtagctgggattacaggcacctgacatcctgcccggctaatttttgtatttttgaagagacagggtttcaccgtgttggccagactggtctcaaactcctgacctcaggtgatctgcccgtcttggcctaccgaagtgctgggattaaaggcgtgaaccaccacaccctgccaggagcctatattttattttattttattatattttattttttgtttttatttttgagacggaatctcgctctgtcacccaggctagagtgcagtggcgcgatctcggctcactgcaagctccacctcctgggttcacgccattctcctgcctcagccccctgagtagctgagactacaggcagccgccaccacgcccggctaattttttgtatttttagtagagacagggtttcaccgtgttagccaggatggtctcgatctcctaaccttgtgatccacctgccttggcctcccaaagtgctgggattacaggcgtgagccaccacacccggcccaggagcctgtattttaaagtcattatcctggtaattgaaatcataggaatggatgatttagccatggtaaacatgcatattaaaaataaatgttccgccgggcacgttggctcacgcctgttatcccagcactttgagaggccaagacgggcagatcacaaggtcaggagttcgaaaccagcctggtcaacatagtgaaaccctgtctctactaaaaatacaaaaaaaattagccaggcatggtggcaggtgcctgtaatcccagctaactcaggaggctgaggcaggagaattgcctgaacccgggaggcggaggttgccatgagcggagatcacgccattgtacttcagcctaggtgacagggcgagactccatctcaaaataaataaataaataaataaataaataaataaataaataaataaaggctcctatttggaatttcttacaatatttccagtggcctgctaaagcattgccaccaggatggcccatatacatctttcttcctagaataggctttccaggattctctattttagttgttggaatcatcacatatataattatatgtccttataattactaatggaagagtaggcaatactggggccacattctaacaggttagcaatcagctaggacttccctccttaaatgagatgtgatttcttgttgccagaatcaggctacatcctgacagccctgcatgcttcctgcctaccctccatgaaaccttgagtttgaggcatctaaaatagaccaacacaatcactcatataatagatattgatcaagtgtctgctaggtgcaagaataggagcctaatgagggcaaatgtgtaatctgttctaggtccacatccagagtagtccctggcccagggcaggcagagggacacatattttgaatgaaagaatgtgacgtcctgaagatatagataaagttcttattgtgaagcagcttaaatcagcaattcagacccacaagcaatcataggccaaggtgatgacaactttcagaatgtcacacatgggaaaaaagacaagaaaagttgaaagttgtgatgtcaccatttagtggttggtgtcaaaaccgatgctcaaatcctagtctatcaagtcattttagggaagaaaataaagtaaaacaaaacacaaaccattctgggcaaattagttgaaagagttatacaccaagacatgtggaaataagaaaattccaatttatgttggctaatgtatgaaactacattcccctaaaccaaaaattaaaatttaatgttatttagccataatttcttaccacccataatttatcatttgcagttattactgaattagtcagcagatacatataaagaccatttttaaatgtaatcttcaactatttctcttaagcatgatatctgagcatacttttacccaacaagttccatgccacaggaaaggaattagttgcttatataataattattgcatttacaagacaatttcaagctaaatctggtattattttcttttagtgtgcagaaatagtgtaatttactacttattagatatagctgttataggaggtacatgaatatcttgggataaaaaatttcaaaatataaccattcagcatctttattaaggagattcagatgttcaaagctcactgcattcatgccaacacctgtctaatccaacaagcaagtctggtggtagtggcatgagcttaaatttgactaccctactgtgggattctggggactttcttacttgacttattctcagtgatgtagaacttggttgagataaactacctttgggactaagactgaaaacagatgtgacatcttatctttttagtttttaggggtctactatttgccagggttggtaaagatggcgttggtaaatttagactatttctctcaaatttaaattgcaaatctggtcagtaattcatacaggaaaaattcccagagtcttaggatgtagtctgggacagctggatgtagaaatgtcagcagctgttcctaatgtgtgaacttcacacagcgtaagtcagaacagaatccaagataatccgttcaggtgaaagctaaattattggcataaaatatgtaatataaagtcacagatagaaattctccagaatgattggcagcttgactccattcttttaaagcattttcttctttttttaatctgagaaatgatcttttcttttaggacaacaaaggtaatcataccattactggaatgctgaagcacacacccagtaaatgcttgagtcatcgatctataggcaaaaccttggatagcatgtctcagacccagtgttcctaaagtttctagggtccaagaaatccactttctaaatggtggaagaatagcaagcgcagggaagcacacgtactcgtccttgccccgggcaggcatcactaatcaactggacactctgctcctgagtctagataaggtctacctctcaaccccattcttcagatagcacatgccttagctccagtgatgaagcttacttaccataactggtagaagaacctgctcaagggagccagtctactttccccaaaagatcaggctagaatgcgtgtcagggctgcaatcgaatcacaaaatgatgtgtactttaacaacaaccgagggtagacagagaatcctcccaaattctgctgagggtagggcctcccgatcaaaaggataaagacattttcttgtaactcagattgtctgaacaatggtgactgcactgtcagaaaaatggctcactttacaagagtagatttttttaaaattaaattgtcctattgacttacattacttggaaagatatctgtttcctattcatgttgaattgtatgaacacagccgactctcacttatgatttcaataaagagtgtctttatgtgttctgagaatctaagaatatgtcattcctcatgaaaccccattacctatggggagaatgtgttgtattctggagagaatgttccatcactggctggtcctagagcaaatgttatttcagattatttacagacaaggttacattttgttccttctgtcattcaccagtgagcttgtgactctctaagctatgtgccctttgtcaccacattcatttgtttttcttgaattttaacattacccatttatatttgggtttctgttttaatatgaccaagtaatcctggatcctgtcaaattctcctctgcatgtctgctgtagccattatgagtctttcattgctgtgttataaccttatagctatccatcagtagcataagacattttgtctattatgacctgatgctcttcaaaggttttcttcatatttctttatctttggggaagtatagtctagaaaatagccaagggcgtacatgaataagttatgttgttaaaaccttagtggaataccatcaatgtaaccttaggctcccatcagtgttcagagaaatcttgtatcttaaatgtgctttctgtaacatttccctcccaatattctatgatttataaataagtaaacattgtttcatataataataattcatttatttaattgagtaaattttattccatctaaaatgtcatgtaccttaaataaatgtgaaagaaaatttaaatactataggcagagaggctaatgtggcattacttaaaatgtgataattaatcctgatactgcttttctccttttacattggctaaagctgatttggagatctgggttgcaaggttctatgcaaaatattctatgatttacaaataagtaaaccttgtttcctatgacaataatccatttatttgagtaaattttattccatctaaaatgtcatgtaccttaaataaatgtggaaggaaaaagaaaatactacagacagagagactaatgtggcattacctaaaatgttataattattcctgatatttcttttccccttttacatcggctaaagctgatttggagatctgaggttacaaggttatcatttgatggaaaccttttactctttttctctcttgctgacaaatcccagattagagccttgtaaattcattcccaagtgctctcttttatcagactaccaaaatttagagagaaattccttttaataaacactgtgtacatatcccaggaaaaaaatcttatcaaggtaaacaggataaaaacaaatcttaccttctgatagattttcttgagaggcgaaagaaaaagaaaaagtaaaattcaatgggtggtggaaggtcctgagcagagatggtagtgggggtagggtaggggggtgcaaagactcagcagtattgcagatcagtcgttcttgaactttatcacatgttaaaattatctaaagagctataaaaatttcagtgcctttctcaatgaaatcagaatatttaagagttggatctagacacagacatttttcagtgtccccactgattccaaagagtgcctaagtttgagagctagtgttgtagtctgcatgcaatttttactattcaaaggattattatagtagtaagtttcattatggccttgacagacccagaccctgttggtttgttaatcaaacatcgttctcagctccttctcccccatgcgcatccattttagacgcatatgtgttctcctcattttcgtagctggtagtgagttttgaattgtttatggcacagaatgtgtatgaggtatgagcatggattgagcgaaagcagctcagatggttgcagggctctgacagtaattccgtgtaccagatcatggtgcttgggtcgaggaaattgcaatggagttggggagaagggatatacttgagcgatatgtaggagtttgccttgacaggaattgatgactgtaaatcgaggtggagacataaagaagttgtcaagaatgactcggtttctgactttagcaacccaacagatgaaggtattgtttgctgagatctgaaatgttgaagtagaattagtttggaagatgattttatgtttggatgcataaactctgaggtgcctgtgagacacttaacgagattgtcaaataagcagtcagctttcagttctagagagctttggtctggagatggagacttgggagtcatcagtcatggcagtaattgagataaccaaagaagacatgtgaagttagaggggaaacagcccatgatagagccctgaagatgggaagaggaacagaagctagcaaagtccatgaggccactaggtagaaaccaaggaattcactggcctagaagcaaaaagaaaagcgtgtttcaagaagggtagaaagcgatcagtgaggtcaagtggaatagaaactataacagaccagtgaatttactggtttggaagacttccataaggtcaggtgagtgggagatgattacatatcattctgatatgcttataaatgcacatgtaacataaagaactgtatggatattagctatttctcctattaaattataaactcattggggaggacacatttatttattttatatcaataacacctacagctctattacctcaaacttatgattaagaaatatttggtggcttggtgaatgaatgcatagtataatacgttataactgtggagaagactgaagatttttcagatttttttaaaaaattatgttgctagttttgagattcctgagtttaatccatccctttaaacttccaattggagaaaatttattctaggttttgagatttttctgatttcataattacagtccctagaatttggaaatgtgtaattccaaataggtgtacatttgaaaatatcagctcctgttccacggacccccaactagaaattataacttttactttatgtactatcagtttacaaactgataagtctacttcagtgtctttggctttaatagagacacattctgtgttatcagcgatttccttcagctttctattctttttcttatgtaagtgttgttattggaatagagagtataaaaattttatccattctacaagtataaagccatatatttagtaattttactatttcaggaaattttatattcctagtttatacaaattagaaataataaaataattaagtataatattttattatattatacaaataataaatattataaattcagtagaaactaacaacacagaaagaataaattgtgacattttctcctttgtattttggtatagatgccgttagttactttaaaaaagtttgtgtaatagaaattacgttatgatttcaatgtgttttctaaattaacttattttttcttggtcaatatattgaaggcattttattaagacaagtgatcttctatgatacacacacacaggcatacacacatacacatacacacacaatttcattgtctggatgaatcaaaattcatttacagagcctcctgtggttagacatttaaatcatttctaattcttcaataatataatcaatacttcaaggcatgtctttgaagctaaattattgtgtacagctatgatttttacctcagaatacatttttgatattcaaactgctggaataaaatatagacatacctaaattattgataagtaatgtgaaattgccaatcattaaaaaatttgcacaggtaatatgtactgagtatagaaaaatatggtaaaagaagaaaataagaaaaatcacttttaatattacagaccccagatcacattttttggatgataacttttgggtggtgatgtctgaatgttgccatggcaacagtaaactgacatgacactggggtgtgtgtctcatggagagatgcttttccctctttcctgtttcactcagtcttcaatctggtctgaagagtctgagccccacctctagagtcaagtgctgcctcctaccttagtatttttggtacaattggtaggaatatgctaatatttaacttataattatattctactttggtcatacattttgaagtgagattgggctatagttggtgtgtctgtatgtgtgcatacatatgtgcacactacttcactatttcactatttagattttggcaatctagaaatactaggtctttctagttgaattgaaataaaattctatttttttgtcagggtatagaaaatagtaataacctggaaagtaccttttcttggaaagtctaaatgaacagctactgctaccacccttgtccaagcaccatcattatctcttgcctggatttagctgttctcctagcttccatccctggttccccgtgatatattctccagcgggcagtcagcatgggacctgcagcatgtgttagatcacacgcctcttctgaggacccaccaaagtttcttatccctctctaaaagctgcaccgctgctcacttactccttatctggtcttccctcatctcactcactttctgctacctctcctggttccctttgtggtttctgttctatgtcaagcaccctctcaccacagggactttgtaccaaatcttctctatcctggaactcatcccagatcgccatcagctatccttcagggatatcttacctgaaaagcatcacactatataaaggagaacttctcatctttcttaagttaatgtatctaggattgttatatgtcaggcacttttctaacgattttctgttaatgcacgtacttttcacaacaacattgcgaggtaaatactattaatctcgttttgcagaaagaaaagctgcgaatgtttgaaataataacttgcccaaattcacacagctactatgtaatgcagtgagggtcttagaacaacaggctgggctgggcgtggtggctcacacctgtaatcccagcactttgggaggctgaggcgggtggatcatttgaggtcaggagttcgaaaccagcttggccaacatgttgaaaccccatctctattaaaaacacaaaaattagccaggcatggtggtgggcacctgtaattgcagctactcaagaggctaggcaggataattgcttgagcccgggaggcggaggttgcagtgagcagagattgtggcattgcactccagcctgcgtgaaagagcaagaaaggctctgtctcaaaaaagaaaagaaaaaataaataaataaataacaacaggatgatgtattcactgccactcctcttctccttcactcttacctcctctctgatttgttcctaggtagcattcacctgaccatttagatcgatttggtttttgtctctcatatttaagtagagatttgctcaggtctgtattcctggaccctggagctacatctggcattcacaagtttccaaaaatatatttcttaaactaaatgaatattgaataaaagaaccaaaaaaatgagttgagcccagagatgagttttagcagtaatcatctgataccttttaaaagctttgatggctgggtgcggtggctcacgcctgtaattccagcactttgggaggccgaggagggcagatcacgaggtcaggggttcgagaccagcctggccaacatggtgaaacctcgtttctactaaaaataaaaaaaattagctgagtttggtggtgtgtgcctgtaatcccagctacttgggaggctgaagcaggagaattgcttgaacctgggaggcggaggttgcagtgggctgagattgtgccactgcactccagcctgggcgacacagcgagactccatttcaaacaaacaaacaaaaaaagctttcattatagctgttgttctattgtgttctattggattggctacatcctgagtcacttttggctatttctattttcctagaaaggcaggctctgcaccccaattttatacatggaaagccacactttagatattatatctattatctgaaagcctatctcacttatccatcttaatattcttcatttgtgatttaacctttgtttttctgaattaggctagaaggcctattacaaacactgaattaattcgtataaagaacgagttcctaaatataataattaactccagtgttttctctgatttctatgtttttctaaaattctacttttccaatttggagatttctcaaataaacaaaaacagaattacaattcaacctagcaatcccattactgggtatatacccaaaagaaaataaattattctcacaaaaagacacctgcactcatatgtttatcacagcacgattcacagtagcaaagatatggaatcaacccaaatgcttatcaatggtgaaatggataaagtaaatggggtacatatacaccaaagaatacttcacagccataaaaaagaatgaaatcatgtcctttgcagcaacatggatgcagctggaggccattatcctaggtaaattaatgaggaacagaaaaccaaataccacattttatcacttagaagtgtgagctaaacattgggtacacgtcgacacaaagatggaaacaatgaacactaaggattccaacaggtggaaggggagagaagagaggataagagttgaaaaactaccttttggatactttgttcactacttgagtgatagcatggttagaagcccaaacttcaccatcatacaatatacccatgcaacaaactcacacgtgtaacccctgaatctaaaataaaatttaaaaattaaaattctgcttttaaattgactcattccctatttttcattaatttccattgtcattgcttttcaccttagtatatttactatcatttttcattatgtaataatgaaatgacatgatgctgaatttgccttactttgcagttttgagcatactccataattctgttatttagtgtttcattattattttctaaataacctctgaatacaactttaattactccttttactcaatagtaaattaaccgtatcttgttttcccaaaggctggcagaatttagttatttaatctttttacattagtttctaggtttgttatataatactcagataatgtggctgacacaatttacactttggggaaaattgctgagacttttacttagggctacagaatgtgacagttcatacttttttacaaggaaatgtaaaaatatgtgtatcattattttattatggtttacacatctatatatttgtaacttagtgattcattatatggtttgttccttacactactataaatgcattattaattatgcaattattaatcatataataagttattaatgaaaatgacagtaatgacagctttgcaatattggacattaattatataaagatactgtatattttaatctttttgttagcccaatgatatatcactattttgattgttgagtcaactgaggcacagaaaagttaattaactttctcaatgtcatatggctggcaaagagtaaaacaggattcaaactcaaatctggctgtattcaagacttacacaggatcttcatcattggtatacactcagagcataacccattttattttctatatgtgaaatcaattgatagtttacttaaaataactatatagtattccattttacatatacccagtaggcagtttttcaatcattatcgctctccttctctcccctttcccctgctggaatcctcagtgtttattgttcccatctttgtgtccatgtggactcaatatttagctcccacttataagtgagaatatgtggtatttggttttctgttccacaatacattttccattctacagtttgcttaatcaatcctttacagattgtacatatcaaatatcaaataggtccaatattttttgttggccaaaaacatttttccaaacgtttttattcattaccacttaatgacaacctaatagataagatttgtcctcatctgtgattatttctttgtggcaaaatatttgaaatgaacagcagaataaaaattcatgtacattgccaagttctatgttctatatttctaaaatacgctccagaaatgctatgttaaatatgattctatcagtaaatgaaacccatgtccttgcatctgtgctcatttttttaaattttaaaggatttccagtaattttataggtaaaagattttttcttttatagattaaaatttttcttggctctcaacacctgttgaaatttagagttggatggaggtgctgtgatttggctgtgtccctatccaaaatatcatcttgaactgtaatatgaattataatccccacgtgttggaggtgggacctcatgggaggtgattagatcatgggagtggttccctatgctattctcataatagtgagtgagctctcacgagatctgatggttttacaagggactttttcccaccttcactctgcccttctctttcctgtctgcatgtgaagaaggacatgtttgcttccccttccaccatgattctaagttttgtgaggcctccctaaccctgcggaaccatgagtcaattaaacctttttcctttataaattacccagtctcaggcagttctttatagcagtgtgagaatggactaatatgggggtaatcatttctcatttattttattattttttgtactacatagcggtttggttgagttcatagacatatgctcaacatacgcagggctaatactattcaagaatatttaaatgtgttggtattgtttaaagggtgtcctttatccccatcagctctttctagtgattagcggtatatggagatgttactgctattttatatttatctttgagtcctgtaaaattattaaagttcccatttttaaagtggtttttcagttgactctctcttgtgtttttatttttatcaagactgataatatcttctaaaaataatgagaattttgtctcatcgttggcaataatttcatctattacattttattgctgttgttacaaaaattctgttggctagaacttcagaacattattaaattaatgataacagaaattggatgttcattccttaatcaggatgcctctacattttacctttttttttgtacaatgtcagctgttgatttcagatggatttttcttcatcacaaataaccaatttttaaatttctagtttattaatataatttactattagaaatggatgttaaatgttattaatttttttaatctatggactgtatactatgagtttctaatgtgataaaatagatttatggatgtaattattgtaaactatgattgcaggccatcagtaaaccttacttggtgatagataaatagataatgttagcatatatgttttctgatctgtagtgctgattctgtggactaatatttagttataagtattccgtatttataaaagtgataacattactttggttttgtgtgtgtatgcgtgtcattttttcaagtttttttttctaaaggataaactagtttttgaaacatgaaacaggaattattctctctatatgtattttctgcttttactggaataatctacagtcagttgagatcatgtgttccctcactttaaaataatttctcctttaatttattttccattaatttttgtatataatataaggaaggggcccagttccaattttctgcctatggctggccagttcttccagcaccatttattgaagagggagtcctttccccattgctggtttttgtcatatttgtcgaagatcagatagttgtaagtgtgcagtcttatttctggattctctgttccattggtctatgtgtcttgcaccagtaccattatccttagcaaactaaagcaggaacaaaaaagcaagtacggcatgttcttacttataagtgggagctaaatgatgagaacacatggacacatagaggggaacaagacacactggtgcctattggagggtggaatgtgggagaagggagaggatcaggaaaaataattaatgaatactaggcttaattcctgggtgatgaaataatctgtacatcaaacccccatgatgcatgtttacctatttaacaaacctgcacatcctgcacatgtacccccgaacataaaataaaagtaaggaaaaaatttagcctgtaaatatatgtacacctggtatgatcaagtaaaccagtagaattaaatggaaagtcacaaaacataactacacgtttgtgaaagtttatgtattacatagcctcgcttgcagatgtctgcaggaaaaatgaactatttaatgaattatgctatgtcagttctttagagaaccatatagaattggatctcaaggtcacactagacacaaaaatcaattccagataaagatatggtttaaatataacagataataatttaatttttaaaagaaggtttaaaagagtattttatgacattggaatatagatttttaaattataaatatgatgacaatgggaagtcataaagaaaatattagtatgttggattacatgcaagatgaccttttatcagaaaatattataaaactgaaaagataaatcacataattagaaaatattttcaaaatatgtaaccaaaaatattagcattcataaaatataaacagcatcttcaaatcaataataaaaaagagcaacatattctgaaaataatttttttttaaagacagaggagtggtgagtgaacacagaattctgtcagtcattgttagtcatacctgtacatcaaaaccacagatagttgttttcagggctccctgagatcatgagcccctgggtctcttgcaacctttaggggcctaaaggccaaatgacagagggaaattggaagcctgaatgggaagagataggaccaatgggttgagcaaagggctgaagaaggtagggacttgaaggaggacatatgagaggatctgtcttcactccttatgatttaagaatccatggttagtcctactcctgagccagtgctccagatcacatacattgatacaaggtaaggagagattctgattcttgtgagtcttagtgaactctggaagctggattcaagtcccagatagttagaactgaagggaagatggacagttgtagaacgaaggaggagcagaagcaatgggaaagaagaggcctaagggtagacagtctggggagatggcaagttttccaaagaggcctttgacgtttcaaagtatccttagtaaaatcatgccaacaagaagggaagcagacagagtcggtgaagcacagagtcagcaggagtcaaaaagggagatttcaatcaaatgaaaagctctaatgtcctagccaatggtaccttcacacttacacacggaagaagttgggactctaacacacctcgtgttccttacagggactagcttcttgtaactgcagaagactagcactgcgcccaggctctttttatctgggacttaaacccagcttccagagttcattcagaattctcagaattagaatttgtacttaccgtgtttccatggactgccatctggagccacgggctcaggagtcggactcaccagcggatccccaataaatcaagagttagaacaaagtcttcagaggtgcacactagagatccttaggtgagcaggcttggagtcaatgatggacccgatcctctctgagtcatggcgttataacagtccaagaaaacccagagcagttaaattggtgaaaacagattttattcaagacgattgtaatgaaggtaaagaaactttgacatacaacagggcttaattccaaatactgcataggccagtaggaagttattgccaaagagcagggtggaaatcagtggatggaaaatcatcaggaggaaacatcaggggtcccggggattctggctaacctgtcctaacagaattcttgctgaagacaagccagggtgattagacaccgcttgggggatgctagaggagcaatatggtttggctctgtgtccccacccaaatcacatgtctaattgtaatgcccaatttgggagggacctggtgacaggtgattggattatgggggcagatttccccctttgctgttctcatgacagtgagtgagctctactaagatcttgttgtttaaaagtgtgtatcacttcccccttcgttctctttctctcctgctccaccatgctgagacatgcttgcttcctctttgccttctgccatgattatgagttgcctgaggcctcccagtcatactacctgtacagcctgtgaaactgtgagtcagttaaacctttcttctttataaattacccagtctcaggtagttctctatagcagtgtgagaacagaatactccaaggaggaagaacctgattcaatattgagggtgatcaaatatggagagtgggaggttcttgctaaactaacttaaaaggattcttgctaaagctggagtttacaaagaagtatccagatgggcctaagagaaagttcaaggacctaactttggtcaagcaaagaatctttgtcacaactactcttatgacttatggtaatcaggtccttactcttctatttttaaatatgtcttttatgttcctaacccttttagtttatagattcctttttccaactcccacaactcttgcctgacaatttgttgaggaaacaacactggattttttttttccttaaaatttcccacagtgtaggattgtgtttgttgactgtatttccacaatggagactaatatttttctgtgtcatatgtatatatatatatttgtctacatatctgtgcatctgtctagctagctagcaagaatacttcacaggtaggatgcattctttgtcaaaggcagataacatttgacacccatgagttactattactgaaaagattatgaacaataaatgtcgatgagactgtggggaatcttaaactttcacacaccactggttagaatgtaaaatggtaaaacccctttgataaaaagttctgatagtttccaatataattaagcacacggttaccttgggaactagtaatgacactcctagaaattcacccaagactgaaaacatgttcacaaaaggacttgtacacgaatatttatagcagctttactcacaacagtccaaacctggagaaatcccacgtgaccatcaacaggagaaagaataagtaaaccttgtggtattcataccaaccaatcataccaaccaatcataccaaccaatggtactccgcagtaaaaagactggagaaacacgtgatagcaaggtggaatttaaaaacattctgagtgaaagaagctttacgaaaggaggatatttggtgtgattttgtttgtatgaacttcttttaagttttcactgttttcttcatttctgtttctgttttcaaatgctttctgtgactttttcaaatttctttttctactaatctagggatttgaaactttgccctgtttctatgtgagtagtcttttcttattcactgtgaaacaaaataaaatcaagatgaaaatattatttcttaattatttaaaggataacccccttgaaatttttttattatccctattgtcaaacaatgctattatagttttctctacatatatttttaaataatcattttaatatttcagtgaattttactactatatgaaaataactgagcaatgttttttaagattactttgttgttcctaacttcatttacaaaattatttctttatgccagattgaaataattatttgagtttttttttaggaagagtactaaatgtaatgctttctgagaatcacacatgaaaaaattatgtgaggtgatagatatattaattatctggatttaatcatcccataatgtacacatatttcaaaatatcacattgtgcctcataaacatatacaattactatttgtcaattaaaaaattgaaaaaaacaccttccagttgcatttgcaaatttaagttatggacttaaaattcttaaaattcttgtgtctaaatactgaaagactgctgggtgatatacaaatattttttaaaggtcagaaaaaaagaaaagaaataaaaacaatatttaagaaagtaggatatggcaatctcacactccctttttgattgctagcagtgttttctttgttcagatcattgacaattttctattcttagactttcagaaatgttttcagtagatgtctagatattggtggcaaaaaaaaaaatccctttgcatcttggggaaagctagaataaatcagagaagagacttggaataaaatcagaccattcagagtcattaaattataaatgatgttcaatttgtttaataagatcacaatggctcatatctgtatttccagcaagttgggaggctgaggcaggcggatcacttgaggttaggagtctgagaccagcctgttcaatatggtgaatccccatctctactaaaacaaatacaaaaatttgtgcggtagtgggcgcctgtaatcccagctactccggaggctgaggcaggagaactcgtgaacctgggaagtggaggttgaggtgagctgagatcatgtcactgcaccccagactgggcaacacagcaagactccacatcagaaaaaaaaaaaaggaaaaaagatcacagagaaatgaaatgagaagaagcttaggaggtagattcagtgaacctccaactctgtggagaaggtagaagaggaggaaagagcaatggaggctgagaaggaaggaggaaagaggaaaaataggagagacttgtcatagaaactggaagaggagttttgaacagaaagaaagaatctaccagttaactggctagctcttgtataagttataattatgtaaagagtgtggcattgctaagatagtagaaatttttattaaaaaatattttttaaagaaaaaaacaagaagaaacaaggcttgtatgcatttaggaaacatttgtcactttaaatttgttttactattggatattcaatatatacaagtatatacaataaagcaaaataaatatctgtatatccatcacctgtttaattgttataaaatcctattgcagctccctgtttatttttcctttatctaaaaaacctaaggatatttatttttcccaagtggtattgatattcttctttattacatagttaatatctgtttaattaacttaggctttttaacctactaatttttattcttcttatttaagcaatttgaccctatatgttttctcctaatttctttcatactgcatctcataagttctaatattttggttgcttttaaaatatcctcaatgggttccatggaaaacccatgtgtgctatttaattgctgggcccagggttcactatgtgtccatatgatcatatttacttttaatttatcatttgatttttatagctccattttattttgctttgtatgttttgaagctatgttgttggatacatataattttcaacttcttataggttcatagtttcttggcaaattgaaaacttacttaattgtgtgctggtgcaatttgtcttaaataatgtttttttgcccaaaggcctactttatttgatatattgtcatcagttttttggttaatagtttctcttatatctcttctcattctttttctttcaaacttattcttatgttttagtctatctcattttaactgtatatcattgtatattttaaatacagttttgcaatcattttccttaataaaatgattagtaagtctatataaagttgtgactatggatatatttggacttatttctccatctcattttattctttcaattgttcctattttaattttttggctgtttcctttttaaaatacttttattttaggttcagagggtacatgtgttaagtttgtgacaaggtaaattgtatgtctctgaggcttactctaggaatgattctatcatcaagatagtgagcacagtacctgacaggtagccttccaatccctacctccctttccctcaccccccagcagtccccagtatatattgctccagtctcagtgtccatgtgtattcagtgtttacctctctttttttgtaagagagaacatgcagtatttggttttcttttcctgtatcagtttgcttaggataatggcctctggctacatccatgttgctgcaaatgacataatttcattcgttttcatggctgtatggtatttcatggtgtatgtgtaccacattttctttacccaatacactgttgatggacacctaggttgatttcatgtctttgctattgtaaataacactgttatactagtgcatgtgtttgttgttgttgttgtttttgttagaacaacttatttttctttgggtatatacccaattgtgagattgctgggttgaatattagttctaagttttttgagaaatctccaaactgctttccacagtagataaactaatttgcattgccaccagcagcgtataagtgttccctttatttcacaacctggccagcatctggtttttttttttttttttgactttttagtaatagcaattctgtctggtgtgagatggtatctcattgtggttttgatttgcatttctctgatgatgagtggtaatgagcatttttaaaaatattttttgtcacatgtatgtcttcttttaagaaatgtctttgctcattgtttaatggggttatttgttttttgcttgtttgattgtttaagtttcttatagattctagatattagacctttgacaaatgcatagtttatgaatattatctcctgttttgtaggttatctgtttactctggtgatagtttcctttgctgtgcagaagctctttagcttaattgggtgcaacttgtcatttttttgtctttgttgcaattgcttttggggacttagtgataaattctttgccaataccaatgtccagaatgatgtttcctgtgttttcttctaggttttttagttttaggtcttacgcttaagtatttaacctattttgagttaatttttgaatatggtgaatgaaaagagtccagtttcaatcttctgcatatggttagttacttatcccagcatcatttattgaatatagagtcctttccccattgcttatttttgttgactttgtcgaaggtcagttggttgtattgtggctttgtttctgggttctctatcctgttccattgatctatgtgtgtgtttttgtatcagtattatgctgttttggttacagtagccttttagtatagtttgaagtcatatagtgtaatgcctctgggtttgttctttttgcctatgattgctttggcaatttgggctcttttttggtgcagtatgaattttagtatgcttttttctaattcagtgaaaaatgtcactggtaacttgataggaacagcattgaatccatacattgctttgggcaatatgtccattttaacaatattgattatttccatttatgaacatggaatgttttttcacttgtttatgtcatctctgatttatttcagtagtgttttgtaactctcattgtagagatgtttcacctccttggtatgctgtattcctaggtattttattctacttgtagctattataaataggactgcattccattctcaatttggctcagcttggatgatatgggtgtatataaacactattgatttttgtgtatttattttgcatcctgaaactttatgaagttgtttatcagttctagaagctttctggtggagtctatggggtttactaggcatagaagcatataatcagcaaagggaaggtttgactccttttcccattcaaatgtctcttaattctttctcctcctgattgcttaggctaggacttccagtactgtgttgaataggaatggtgagaatgggcctcatcatcttgctccatttttcaaagtgaatgcttcagcttttgcccattcagtatgatgttggctgtggtgaggatgtatatgtgacattgatggctcttattattttgaagtacgttccttcaatacctagtttgttgagggtttttaacatgaagtgatgccgagttatactgagcaccttctctgtatctcttgagataatcatgtcgtttttgttgttaattctgtttatgtggtgaatcacatttattgatttgcatatgttaaaccaaacttgcatcccaggaacaaagcctagttgattgtggtgaattaactttttgatgtgctgctggattttgtttgctagtattttgttgagaatttttacatctatattcatcaaggtttttggcctgaagaagttttcttttttaatcatgtctctgccaggctttggtaccagagcaatgctggctttgtagaatgagttaggaaagagtttctcctcctcaatattttggagtaatttggtagtattagtactagttctttgtatgtaatttggttgtaaatccatctggttcagaaatttttttggttggtaggcttttgattactgattcagtttcagaactcatttcttctttttatcatattggattacttgtttttttcttgtttattctaacagtttttattctactggtttagaatttaattactctctttttgttctgtttggttttatccttgaaattttgacattcatgtataattaaatgtaaaatcagtctcatttctgtactccagaacaggcttagaattcagtaattctgataatttccttctcaaagcatatgctgatgatcaatattttagttttgtgggtttttgaacaattgtatattattactatagttgtatgtatgcaaattttttttactttggtgtaaatttgcctacaagtttacaagagtcttttgtttgtttgtttcttctactttgattctcagatctttattttcagatcatattctttctttgtaaaagttatctcttagaagtgatggtcttatgttagtaaatactttgattatttatttgagaatgtgtttattttaccctgattcttgagagtttatttcactgagtataaattacaaattagtagtaacgttattgttgttggtcataattcaaagatacatgtatatgtcctctagcttccattacagctgtgaggaagtcagctgtcagtatactcaatcttgttttgcaggtgatttttctatttattctggatgttcttataattttcttttagcgtttgatatcctgttgttttacaacaatggttctaataatttatgtcaatcctggcttttggaaaattctcagaatttttcttttcatgtactccctctctaattctcttcatttttctctttctggaactctgattaaacatgtaaaactttttatcctgcctgctgtcaacttatttgtcctatttttctattgctttgacattctggttatcagtattagatctgtttatatctttaagttttctaaagctctctttttaaaaataatttttcattttaaatgtttgtgggtacatagtaagtgtatatatttatggggcacatgagatgttttgatacggtcatgcaacacataaaagcagatgtcttctgtgggagtggaaccctcatggagaatctctagcagggcagtccagaggggaaatgtggggttggagtccccacactgagtctccactagggcacagcctagtagagctatgaaaagagggccaccatcctccagacctcagaatggtaggtccactgacagcttgcactgtgtgcctggaaaagctgcaggcagtcaatgccagcccttgagagcaaccatgggatctgcgccctgcagaaactcactctttgcatcagtgtggcctgtatgtgagacatggagtcaaagattattttggagctttaagatgtaatgagtgccctgctaggtttcgaacttgcatggagcctgtagcccctttgtttttgctgatttctccctcttggaaaggctatgtttacccaatgcctgtaccctcattgtatcgtggaagtaactaactcgttttttattttacaggctcggaggtggaagggtcttgccttgtctcagatgagactttcaactctaggcttttcagttaatgctgaaattagttaagactttgggggactgttgagaatggatgcttatattttgcaatgtgagaaaaacatgagactggggggacaggggtaaaatatggtttagatttgtgtcctcccccaaatctcatgtcgacttgtaatccccagtcttggaggagaggcattgtgggaggtgatttgatcatgggggcagatttccccctttctgttctcataatagtgatgaagttttcaccatatctggtagtttaaagctgtgtagtaccttctattttgctctctcctcctcctgctccatccatgtaggatattcctgcttccccctcaacttccaacacaattgtgcatttcctgaggcctcctcagctgtgcgtcctgtaaagcctgtgaaaccatgagccaattaaacctcttttctttataaattacccatattaagctactcaatgagataccagggtaaggtaaaaactctcataaacaaaaatttaaaagtagttctagatatgaataaaacaatttctagagagacagatataaagaaaaaccaatcagaacttctggaaatgaaagacacacttagagaattacaaaattcagtgtaaagttttaacaatagactagaacaaatagaaaaaaaaattagacatcaaatataaggtttttgaattttgaataagtgtgatacataatataaacagaattaaaatcaaaaaccatatcatcatatcaatagatgcaaaagcatttgacacaatctaatatccctttataaaaactcttaccaaatgaggcatatcagggacttacatgaaaataataaaaaccatatatgacaatccgacagccaacatctactgaatatagaaaaattaaaagcattccccctgagaacaggaacaagacaaggatgcacactttcaccacttctattcctcatagttctagaagtcctagccagagcgaataggcaggagaaggaaataaaggatatccaaattggaaaaggggaagtcaaactatccctgtttgcagattatatgattgtttgtctagaaaatcttgaagactcctccgaaagattcttaggttcgataaacaaattcggtgtctcaagtaacaaaatcaatgtgcataaatcactagcactgctatataccaacaacaaccaagctgagaatcaaatcaagaatagagtcttttttataacagctgcaaaaaaaataataaaatacttagagatatatttagccaaagaggtaaaagatctctatgagaactacaaaacactcctaaaagaaatcagatacgacacaaacgaatgaaaacacatgctcatgtgaggaagaacaaatattgggaaaaggatcatagtgcccaaagcaatctgcagattaaatgcaattcctgtcaaaataccaacatcatttttcacgaaattagaaaaaactatcctaaaacccatatggaaccaaaaaagagctcaaatactcaacgcaaacctaagctaaaagagcaaatctggaggtatctcattaccggatttcaaattatactaaggctatagttaccaacacagtatggtagtgatgtaaaaggagacacatagaccaatggaacagaatagagaaccaataaataaagccagatacatacagccaactgatctttgacaaagcatacaaaaacataaatgggtaatagatcctctatttaataagtggttctgggaatgctggcaaaccacatgtaaaataaggaaactggatccctatctcttaccttatacaaaaaaatcaactcaagatagattaaaaacttaaatatagggcctgaaaccataaaaattctcaagataacactgggaaaactcttctagacatcagcctagacaaataattcatgactaagacaccaaaagcaaatgcaacaaaagcaataataaataaagggacctaattaaactaaaaagcttttgcaaagcaaaaggagtaataatcagagtaagcagagaacccacagaatgtgataaaatatttacaactacacatcagacagataactagtatccagaatctacaaggaactcaaacaaatcactaaaaaaaatcaaataatcacatcaaaaagtgggcaaaagacatgaattgacagtgctcaaaagaagatacacaaatagccaacaaacatgaaaaaatgttcaacatcactaataatcagggaaatgcaaataaaaccacaaggagataccaccttacttctgcaagaatggccattattaaaaattcaatagatattgctgtagatgtggggaaaaaggaatacttatatattgttgttgggaatgtaaatttgtataacctgtatggaaaacagtgtggagattttttaaaagaacaaatagtagatccaccattggatccagcaatcccactactggatatctactcaaagggaaagaagtaattataataaaaagacacttgcacatgtatgtttatagcagcacaattcacaattgaaaagatgtggaaccaacataagtgcccattgactaatgagtgaataaagaaaatgtgctatatatacaccatggaatactactcagtcatataaaggaatgaaatagtcttttgtgcagcagcttggatggagctggaggccatcattctaagtgaagtaatacaggagtggaaagccaaaaaaaagtgttcccacttataagtcagagctaagctataagtatgcaaaagcatacagagttatataatggacttaagagggggagggtggaagggaggctaggggtacaaaaactacatattgggtaacatgtacactaccagggtgatgggtacactaaaatctcagaatttgccattgtgtgattcatccgtgtaacaaaagtccacttgtaccccaaaagctactgaaataaaaatttaaaacaaaacaaaaacaacaaaataatcatttgatcacacagaaaaagtaaatccaaactctaaatctgagtgccatttggtgattgtacatttgaggaaaaacattttttctcctgtaggtagagtcaaaacacagacaggtgtctttgacagctccttttgtgaaatgggctgggtttttctttattttaacttgtcaagatataaacattggagacttggataatgcaaggatttctgctccaactccctgctttccgtgggactaaggctaatttccatctttctcagggccctcgcacctgaatgtttcctgtgactcatgagataagcagcagcctttcatgcaggtgcctgcatcagtgcccttctgactgtatgcccacttcgtatcacaaccatgtgcttaaaaaggtatttatttttattttttattttttatttttttttagacggagtctcgctctgtctccaggctgaagtacagtggtgcgatcttggctcactgcaacctctgcctcccaggttcaagcggttctcctgcctcagcctcccgagtagctgggactacaggcacgtgccaccacacctggctaagttttgtatttttagtagagatgaggtttcaccatgttggccatgatggtctcgatctcttgacctcgtgatggtgcccacttcagcctctcaaagtgctgggattactggacgtgatctgcacccagccaaaaaggtattttcatatgtatttttctagagttttaggtattcagtagaagaagatttttaggacacctagtttaccaatgattttttaaagagtgtcaagtcccacatatattagaatctaaatagaacatcaagttttagaagtaatttattgtcattagtacttagaagtgacctaacactgaaaattaaaaaccaggagacagagaagaaccacctagtatcttcccaagagctagatatttgcctcttggatgtttgctggtttttctgtgagatcccaagatgataatacattcttgtgggaactggatttaatatagacaggttttgatgtaatgttgaagaaaaacaaagctcaattaatgaggcttttcaatttgaagagtggaaacacagtgggggaaagacactggggctttgggtaactaatgaaggcacaaagaactcctggtacttttcaaggaaaacaaagtacaagagggtaagtgaatcataaaaaggagatgatgaaaaatagtagcaattgcatatttccaaacttattagatggttggctgtttaaacatttgtattaaaatttaagaaaatgctgtgtttcaaaaatatctaaatttacttgtgatatttagatgattatttaaaattataaaattctgtctttttcttgctggagttacaaatattgtttgggctgatgtttttcattagcggtagtaatttgtgtgttttattgtttttgaaggaaacatatgggacagtgctttgggattatgttgaccctacttttggtctaaatattgaattaaatttcaatgtggaaaagtaaaaatatcataaagacagtatcattcttatatgtgagggtctgtgtctacaaatttaataaaaatcaatataagaacaattatctaaatagtgtggctgaacacatggacccccaaattcttaaaacctaaatgttctttgtcattcgtattccatgataatgtatgcatcaaagacagacttggttgatttttgttcccttcaattattcactgagacctcaactttcagtcagatcagttgcttcccactcaactcttgcagattgcaaatcttccctgttgagttgcacagcaactgccactcaacctcacctgcaaaaggttagtccaacatctttttttaaaatatatttttgtggctctagaaataagcaagccagctggcagtattctaaaccaagatgctcagatcttgttgttaagtgtaacaccattgccttcctaatttttgcaactacaagagtacaataaaaagtacgttctataaggaagaagggagcttgaaatctaagcttatctctgccagttactggccatatgattttataattatctcccttccccttttttagcttgcgtttttttatttctaaggtgaagtagttaaatgagatgatcgtttggattgcttccaggtctgacattctgatgatcacatgaaataaaacctttgtgagtgcactgtgctaggtggtcttatataccactccaaggctgtttcattatgcaatttatggtgtcaatattccttatactgtattctatagtaacggtgccttctggaggacattgcagagggaggcacttacatatattaacatgtgccactcagccacattctatgccctaataaaatacttgaggaaaaagcaaaggaaaatttgaaggggtggggtctatacattttatgtagggaatctcaaattcagaatggttaagtccattgcgcaaggtcatccagtaagtaagtggcagccgtggtatttgaacatttggtagccagattcctcaagcagtgcccctttaatcaggctttaacgttatttttcactggattatgacactcatatattgtatttttcaggctcatttgcaaatagaaaaaaaagacagtcaacgcaatctagcttaagcgctccataatagttaattaattaaaaataattattagtttaaataaatgaaaggtccatataaaaattgcatcaagcttcaaatcaagacttttctctctacctctgaatcctgttcctcactatgttagttttgttctaaggcaagcatgtcccatgtggtaatgcaatggcgctaaattctatggtttatttttatagactgaatgttcatgtccctccaaaattcatatgctgaaatcctaaccccaatgtgatggtgttaggagttggggcctttgaaagattgttaggtcatgagggtggggccctcaagaatgagattagtggcctaatataggaggcctgagaggtgctcctcaccccttccaccatgtgagaacatagccagaagatggtcgtctatgaaacagaaagtgagtcctcattcagacaccaaatctgcctgctaattgatcttagactctccaggctcaacaattgtgagaaataaatgtttattatttaaaacacccagtctatggtagtttgttatagcagcccaacagactaaaacatattctcagaaaccctagtggaaagacagattccattcctcagtagttccaactgaagttggagttcttcataagttggagttcttcattgacaggtcaggccatctaaaaagggtccaggtgaccagtaggaacagaatactctgtccctgggtgtaaaatgcctgctcagtcctgggatgtatggggatagtgttagcttcactgaccacaaggatgaaaacaatgtcaaacatgggccgagagaagaaaatcgtggtgccagaggttgggatgtagtagatgccaaaggaacaaaatgtaacatttatttactacagatgcccagttccaaaactgagactcaaccgttgttactgtcaaagtgaggaacgaatgtggtgaaagaagaaatgctgtgttttgaagctctctattctctgtgtcgtattttttagctaagccaactgatagtacgttgaggtagttcattgccaagtgacagctctggttgacataagaaaaagattactttatataaatcttctgttctttacccattatgatctatttttgatattatttcagaaatagacctcaatataaggggataatattattggtaggtagtaatttgaaaggaaactctggttcttccaatatttccatgaaaatatccttaatctgtcttttaatatctcacacaacaatcctggaaaattggtattctcccttgacacggagtgttacctgacctcacagaaaataggtagaatgtcaactttcagcattcctcttttatttatagaggttattaacatgtcatctttcttatattatgaacttttcagaaatatgcagtactctctcagatgagttctcaggacaatctcttgaatggctccacaaggaaacacatgatgaaatgattggttgataatttgaaaagacatttctatttaacgaacatgatttacttgaaaacatgtcgatgctacagagttcacagaaatgggaattacacattgtcaacaataaaatttgtgctttttatttccttgtgactccattaggaaacaataggtgttttgtgtttattggaataatttattccttacaaattatgcatcaacattagcaaataacagtctatgcaaaagcattgataatgcatttattacaattatagtattgccactaaaagagaaaaaagtgtgcttcattacctgtataaaaggtacaactatttcagtaggcctttcctcttttatgaagtaggtataattctcttattcttaagaatatttatatattgatagccctcatggctgaaagtttctatggccctatcacaattttcccaataggaatagtgtttattttttaaaaattcctctttttagcagggatcacagtgtatagcacatattacttgtttaataaatacctgttgaagaaattagtaagtacaaatacatttttgattccataacttgcttagtctcagagacttaagaaaacaatggtgggatataaaaaccatctatattttcactgagtggaaattatcttgacaagagtttgacaggatatgaatatcttgaatgaaacattatttactctctgaagaatgtgtatttttaaataaaaagaatcaagtaaaagacaccctggtccccaatatattaaagcctatttcttgttcagtagtaacaggcaacatctaatttatgtatcataataactatcccagttttagaaatgaatttaacccctgtaaaaatttgtaatatgaaacacactaaaggtagttagaaacagcaaaatagaccttaacacagtgaccgtatcatattagtgtttttaggcagtggaaactccagctgataaattatccaaaggcataattatagcacatttctgcaaataggagctggatgtatacaaaataaagtctgattaggtgccatcagaatggcaccaatggatcaacagcctaaataacttaatgttagtgattaagatgatgactaattagttgttcatttgtctttaaaaaaaaagtgaaccctagcatggtcagttgccatttcgattatgaatcattatttttttccttgttatagagggagagcaaacagttggttcttttaaattgcttttccctggcatctggaacaggtcttgtgagtcagagtgaaatttccgatttaaatcaccccagccaagtatcatttgatcaagagtagaaaatagtgacggttagtaaattaacttctctcagtatagataaacacataataatttcaaactctccaggaaataccatcctattacaagaatttgtttaaaaattgtgagattttctccatgctgtgcaattgcccgtaagttgctgtaaagggagaagaacttggcttcgtttgaaggctgcagttcccagccctgcttcatcattgaacaaatgaagatcacgccttagctctttatctattaagtgagataaatcagaatgttctgattccatgtctctagagtgaactttatcaccgggtgttcacatgagcagaagctaaatagttccaggtggtttgatgtgtctctcagactcgacatctgccctgtaatacagttccaagttttcatgccattgaccatttagaagtaaagcatgatcttgaacccagtctggccactagcttctctgacctaatcaaggtattgagcttttgctcgactctctccccacctggattcttgctccaataacatcttgcatcaataagaactcttagttttcaatgagtgaaaactgttttaaatcattgtaatctaaaagagaaaatttattggttcatgtaagtttaaagttccaatataccatttgcttcagacagaactagatctagcagctcaaatgacatcatctgaactctttctctccatctctcttggctctttttcatctttgttgcattcctgctaaatcaaggcctctgttagtaggatgaagatggtcatgatcagctccatgtgtatatactgccagcttagtaaatttccatagttccgacataattccaggctggatcattgactctgattgacttacttaaataatgtgatgctgtgagtccccatccataacacatagattgatactgtgttgtttcaaataaaattcagttgctctaaccagaaaacagtaaaataaattctgagtatataaaaacaacatccattcactgtattctctgtagcagagattgactgtttactaagctaagtcattttcttcctagcgagatagctagactacaattctcaggcctctttgaaacaagtgtgaccatgtgactgagtttcagcctatggaaagtgggcagaagtgataccacagctttcaggcatggtccctataaccctctcatgggagacccttccttcatttactgcttgctacctgaatattaaacaccagagtgaacttgatgtttgtaggttgaagatgacacaacctctgtcagcctagattcctgattggagcagaactttgaaaccacccttccacacacacaaaattggtttttatgtgagtgagaaataacacagaaaacaaaaaaactactgtactcagccactgagatgttagggttattcaattctatcaactagcatccgcttacacattctttaacagacctaatattccctgtaatatacctcagctattcccgcatgttaaacagtttcttatttagagcaaagaactgtatccaactaaaagttccatattgtaccttacctctttacattagatgtggtgaagtcccattcagaatttcttaaattttagttttatatgttttatgttctaaaagctttgtctaccccagagctgcaaaggttttctctcatttttttgtagaggttttccagttttagattatacattttgaattaatttttgtgtatgactgaagaaaaggtcaatgttcattgttttctcatcagaatatctagttaatctaacaccattttgttaaaaaagttttcttccttaattaaattggcttggcaactctgtcaaaaaatgaagtcattatatatgtgagaatcaatgtctgacctctcttttctatttcattgatctataagtctatctttccaccagtagcaatctatttgaattactgtatcctcatagtaaaattaaattatataaggtaagtcatctaactttaaaaaaatgctttgttattttatttctatctttatataaattttagactttcttgcactacaaaatgaaacagtttcatcttatataatttctgcccaattcctagaatcaatttctccaaggaattctgtttttctttactggatgatggtattagaaaccaatatctgggcactaggtgtgctcaatgttactggggtgtcaataagtttagcttgcagaggaaggaaataatatgtgttcactaacacatgtattatacatagatctgtaaatatttttacatgtaaacatctatatattaagctaaacatgggttcagaatgctgtctcatattctaatccattaaaatatggatcattctagtctcttattcttgcttattgctaacttcccattccaacagtgagagatctagcctcaaccatctaccatctatttacttgtttaattccagcctagaagcacagaagtattacaatttttaccccatatctcatactacactccagagattatatcaagtttctctcttagtcttatagacttatttccaaaactacgtagattagtaccttttcccccactccatcagtgaattgtttcatacacataatataattaaatttttttgtcactttctgcattccaccctgggatctcctgaccttctaaatgatttttgtgtttgcataccttaaggtttactgtttgcactgaaaacctctatgggctttgacaaatgcatagtgacatgtatccacagttacagtatcatatacagaatagattcactgccataaaaagtttcctgtgcttaatgtattcaatccttcttcaccttctgctgaacccctggcaacgaatatgatttttatacttacagttttaccttttccagaatgttgtaaattggaatcatacagtatactataaacttttcagactagagtcttttacttagaaatatccatctaagattgatacatgtcttttgtgattaattttccttgtcacttaaatatttttctactttttttttttttttgatatagagtctcactctgtcgcccaggctggattgcaatgatgcaatcttggctcactgcaacctctgcctcctgggttcaagctattttcctgcctcagcctcctgagtagctgggactataggcaaatgctgccacatctggctaattttttttgtattttttttgtagagatagggtttcaccgtgtgagccaggatggtcgcaatctcccgaccttgtaacccgcctgccttggcctcccaaagtgctgggattacaggcgtgagccaccgcactggcctacctacttatttatatttattttaaactagcttttagcatgttgaatatgaaatgtctaggtgacaagtttgtgggctcattctactcagattttcttcagcttcctgaacttgtagaataatattttcttttttttttcttttgttttcttttattatgattacactttaagttttagggtacatgtgcacaatgtgcaggttagttacatatgtatacatgtgccatgctggtgtgctgcacccattaactcgtcatttagcattaggtatatctcctaatgctatccctcccccctccccccaccccacaacagtccccagagtgtgatgttccccttcctgtgtccctgtgatctcattgttcaattcccacctataagtgagaacatgtggtatttggttttttgtccttgcgatagtttactgagaatgatgatttccaatttcatccatgtccctacaaaggacatgaacacatccttttttatggctgcatagtattccatggtgtatatgtgccacattttcttaatccagtctatcattgttggacatttgggttggttccaagtctttgctattggtaatagtgccacaataaacatatgtgtgcatgtgtctttatagcagcatgatttatagtcctttgggtatatacccagtaatgggatggctgggtcaaatggtatttctagttctagatccctgaggaatggccacactgacttccacaatagttgaactagtttacagtcccaccaacagtgtaaaagtgttcctatttctccacatcctctccagcacctgttgtttcctgactttttaatgattgccattctaagtggtgtgagatggtatctcattgtggttttgatttgcatttctctgatggccagtgatggtgagcattttttcatgtgttttttggctgcataaatgtcttattttgagaagtgtctgttcatgtccttcgcccactttttgatggggttgtttgtttttttcttgtaaatttgtttgagttcattgtagattctggatattaggcctttgtcagatgagtatgttgcgaaaattttctcccattctgtaggttgcctgttcactctgatggtagtttcttttgctgtgcagaaggtcttcagtttaattagatcccatttgtcaattttggctttatgttgccattgcttttggtgttttagacacgaagtccttgcccatgcctatgtcctgaatggtaatgcctaggttttcttctagggtttttatggttttaggtctaacatttaagtctttaatccatcttgaattaatttttgtataaggtgtaaggaagggatccattttcagctttctacatatggctagccagttttcccaggaccatttattaactagggaatcctttccccatttctcgtttttctcaggtttgtcaaatatcagagagttgtagatatgtggcgttatttctgagggctctgttctgttccattgatctatatctctgttttggtaccagtaccatgctgttttggttactgtagccttgtagtatagtttgaagtcaggtagcgtgatgcctccagctttgttcttttggcttacgattgacttggtgatgcgggctcttttttggttccatatgaactttaaagtagttttttccaattctgtgaagaaagtcattggtagcttgatggggatggcattgaatctataaattaccttgggcagtatggccattttcacaatattgatgcttcctacccatgagcatggaatgttcttccatttgtttgtatcctcttttatttcattgagcagtggtttgtagttctccttgaagaggtccttcacatcccttgtaagttggattcctaggtattttattctctttgaagcaattatgaatgggagttcattcatgatttggctctctgtttgtctgttattggtgtataagaatgcttgtgatttttgtacattgattttgtatgctgagagtttgctgaagttgcttatcagcttaaggagattttgggttgagacaatggggttttctagatatacaatcatgtcatctgcaaacagggacaatttgacttcctcttttcctaattgaataccctttatttccttctcctgcctaattgccctggccagaacttccaacactatgttgaataggagtggtgagagagggcatccctgtcttgtgccagttttcaaacggaatgcttccagtttttgcccattcagtatgatattggctgtgggtctgtcatagatagctcttattattttgagatatgtcctatcaatacctaatttattgagagcttttagcatgaagggctgttgaattttgtcaaaggccttttctgcatctattgagataatcatgtggttttggtctttggttctgtttatatgctgggttacatttattgatttgcgtatattaaaccagccttgcatcccagggatgaagcccacttgatcatggtggataagctttttgatgtgctgctggattcggtttgccagtattttactgaggatttttgcatcaatgttcatcaaggatattggtctaaaattctctttttttgttgtgtctctgccaggctttggtatcaggatgatgctgacctcataaaatgagttaaggaggattccctctttttctattgattggaatagtttctgaaggaatggtaccagttcctccttgtacctctggtagaatttggctatgaatccgtctggtcctggactctttttggttagtaagctattgattattgccacaatttcagagccaataattttacaattattggtctattcagagattcaacttcttcctggtttagtcttgggagagtgtatgtgtcgaggaatttatccatttcttctagattttctagtttatttgcgtagaggtgtttgtagtattctctgatggtagtttgtatttctgtgggatcagtggtgatatcccctttatcattttttattgtgtctattcgattcttctctcttttattctttattagtcttgctagtggtctatcaatttttttgatcctttcaaaaaaccagctcctggattcattaattttttgaaggattttttgtgtctctatttccttcagttctgctctgattttagttatttcttgccttctgctagcttttgaatgtgtttgctcttgcttttctagtgcttttaattgtgatgttagggtgtcaattttggatctttcctgctttctcttgtgggcatttagtgctataaatttccctctatacactgctttgaatgtgtcccagagattctggtatgttatgtctctgttctcgttggtttcaaagaacatctttatttctgccttcattttgttatgtacccagtagtcattcaggagcagcttgttcagtttccatgtagttgagcagttttgagtgagtttcttaatcctgagttctagtttgattgcactgtggtctgagagacagtttgttacaatttctgttcttttacatttgctgaggagtgctttacttccaactatgtggtcaattttggaataggtgtggtgtggtgctgaaaaaaatgcatattctgttgatttggggtagagagttctgtagatgcctattaggtctgcttggtgcagagctgagttcaattcctgggtatccttgttaactttctgtcttgttgatctgtctaatgttgacagcggggtgttaaagtctcccattattattgtgtgggagtctaagtctctttgtagttcactcaggacttgctttatgaatctgggtgctcctgtattgggtgcatatatatttaggatagttagctcttcttgttgaattgatccctttaccattatgtaatggccttctttgtctcttttgatctttgttggtttaaagtctgttttatcagagactaggattgcaacccctacctttttttgttttctgtttgcttggtagatcttcctccatccttttattttgagcctatgtgtgtctctgcacatgagatgggtttcctgaatacagtacactgatgggtcttgactctttatccaatttgccagtctgtgtcttttaattggagcatttagtccatttacatttaaagttaatattgttatgtgtgaatttgatcctgtcattatgaagttagctggttattttgctcgttagttgatgcagtttcttcctagcctcgatggtctttgcaatttggcatgattttgcagtggctggtaccagttgttccttcccatgtttagtgcttccttcaggagctcttttagggcaggtctggtggtgacaaaatctctcagcatttgcttgtctgtaaagtattctatttctccttcacttatgaagcttagtttggctggatatgaaattctgggttgaaaattcttttctttaagaatgttgaatattggcccccactctcttctggcttgtagagtttctgccgagcgatccgctgttagtctgaagggcttccctttgtgggtaacccgacctttttctctggctgtccttaacgttttttccttcatttcaactttggtgaatctgacaattatgtgtcttggagttgctcttctcgaggagtatctttgtggcattctctgtatttcctgaatctgaatgttggcctgccttgctagattggggaagttctcctggataatatcctgcagagtgttttccaacttggttccattctccccgtcactttcaggtacaccaatcagatatagatttggtcttttcatatagtcccatatttcttggaggctttgctcatttctttttattcttttttctctaaacttcccttcttgcttcatttcattcatttcatcttccattgctgataccctttcttccagttgattgcatcggctcctgaggcttctgcattcttcacgtagttctcgaggcctggctttcagctccatcagctcctttaagcacttctctgtattggttattctagttatacatttgtctaaatttttttcaaagtttttaacttctttgcctttggtttgaatttcctcctgtagctcggagtagtttgatcatctgaagccttcttctctcaacttgttgaagtcattctccatccagctttgttcctttgctggtgaggaactgtattcctttggaggaggagaggtgctctgctttttagagtttccaattttttgctctgttttttccccatctttgtggttttatctacttttggtctttgatgatggtgatgtacagatgggtttttggtgtggatgtcctttctgtttgttagttttctttctaacagacaggaccctcagctgcaggtctgttggggtttgctagaggtccactccagaccctgtttgcctgggtaacagcagcagtagctgcagaacagcggatttttgtgaaccgcgaatgctgctgtctgatagttcctctggaagttttgtctcagaggagtacctggccgtgtgaggtgtcagtctgcccctactggggggtgcctcccagttaggctgctcgggggtcaggggtcagggacccacttgaggaggcagtctgcctgttctcagatctccagctgcgtgctgcgagaaccactgctctcttcaaagctgtcagacagggacatttaagtctgcagaggttactgctgtctttttgtttgtctgtgccctgcccccagaggtggagcctacagatgcaggcaggcctccttgagctgtggtgggctccacccagttcgagcttccctgatgctttgtttacctaagcaagcctgggcaatggtgggcgcccctcccccagcctcgctgccaccttgcagtttgatctcagactgctgtgctatcaatcagcgagactccttgggtgtaggaccctccgagccaggtgcaggatataatctcctggtgtgccgttttttaagcccttcggaaaagcgcagtattagggtgggagtgacccgattttccaggtgccgtctgtcacccctttctttgactaggaaagggaactccctgaccccttgcacttcccgagtgaggcagtgccttgccctgcttcagctggtgcacagtgcgctgcatccactgtcctgtgcccactgtctggcactccctagtgagatgaacccggtacctcagatggaaatgcagaaatcacccatcttctgcgtcgctcacgctgggagctgtagaccagagctgttcctattgggccatcttggctgcccttaatattttctagcaaatttggaagatttttctaccatgttttcttcaaataatttttctaccctttctttgtctgttgaactccaatcatatgtatgtttagatatttagtattgtccttcatgtttcaaatactgtgttcatttttcttcaatatattttgtctgttatttggactgtatgatttttgttattctatactcaagctcttgattttttgctatgtcaggtctgctcttgcactcatctaatacatttcttgaaatttttattattgttctttttagatctaattttttgtttattttttatagtttccacttctctgtgacaagttctcatttattaacttatcattgtcataatctctttaattatttgaacatatttttctttaattctctgtacataattttaatgtgtgcattgaagtgttcatctgcacagtccaaaatattgtcccacttagactctgtttctattgccctcttattttcatagcatgggaaatacttctctgtgtttttacaagtcgaattgttttttattttaagctacactttttagacaacagattgttgcaactctggattctgttttattcttccagggactgttaatgtttttctttgtaggcacatactttgcctggtctcacactgtaaagtctgtctccttcactcagagcagtcacagatatctatactgaagtttcatttgtttgcttatttgtttactagctccctagttctctcccttttgctgttgtaattagcagtcaaccactgatgtggacagaggttgtgctcagcaatatgaaggcagtaaatcctttacccactgttgcttaagttttatgtgggttgaggaattcatttagatgtgtgggttgattcctgagtgtcccagggctttgaatttttaccagactccctcctttccatgtatacattattttaaaaatcaggtagaaatgtatgaagagtatattctttcagcccttctacagctctctctaacttcaatttacatttccagctgttctgctacctgccactacttctggctagtagaactttgagttttgtattgctcaagctgggagagacagaaatgcctgcaggcaagatggccacaaatctactatccttacttgtagcaacagggttgcccatgagtaaacacttcgcaagttgttgctgtgtctagttattttccagtgccctgtaataagtttttcttcttaaaataattttgtatatttgtatgcttgttgtatatagagggtaattgcctgaattgctaatgctgcctttctggtagcagaaatgaatatttttttaaaaaactaatattttccagtggttgaaaatgcaataaacatgcagattagagtgaaaagtcttctttcagctttgtctctcagccaccctggaagagaatcaacaaatttcagtaaattactattatccttccagggatattttatgcatatatttgctgtgtgtacatacattactttttcttttttttcacaaattgttctgcatcttttttcctataagaaatatcaacaaataaatataattcttaatgttatgcatatctatttcactgaatatatgtatattaaattttatatattcaacatgtataaacatttcgacttctaaaatctttattatgaacaatgttacaatgaataaaataatagataactgtattagttgtatattcatgtgtaacaagttacttagaacattagaaagtttttgagtcagaaattcaggtgtagttttgttgggtgttcctgactctgtgtctctaaagagagcagattttcttttttttattttattatactttaagttctagggtatatgtgcacaacgtgcaggtttgttacatatgtatacatgtgccatgtcggtgtgctgcacccattaacttgtcatttacattaggtatatctcctaaagctatccctcccccctcccccctccccccaccccacaacaggccccaggtgtgtgatgttccccaccctgtgtccaagtgttctcattgttcgtttcccacctatgagtgagaacatgtggtgtttggttttctgtcctggcaattacgcagccataaaaaaggatgagttcatgtcctttgtagggacagggatgaagagagcagattttctgtctatctctggtcaaccttcaggtttagtgtctgttttcttttactaataaagctttcaagttttatccatgcatcatatatacacataatattacttcattcctttttagagctgaataacattccacaatgtgaatataccagtttgtttattgcttcatcagttaatgagtgttttagttatttctaccttttctctattgtgaatcatgttgctatgaacgtttcagtaaatgcatgtatatgtttgtgtgtgtttgtgtttgtgtacatgttttaaatccaattggatatatgcctagagtgaaattgctgggttataaggtaactctaccattacccttttaagaaatggcattgatttctatactttaatttactgacattaccaactaatattttcaagttcatgagtgtatgaaaaccattagcaatattagggtagtttatgtttagcaagcaaattgctattcctttacccacaatttatttatttaatttattcaataaatgttcaagaaaaagaattagagagagaaaaatactaaaaattgatcaagcaagtgcatcatgtattttacagaacatatatactgtgataaacacgggagactatttgtacctctactttcaaatcaagaataaggagctcattttgtatcaattatacgtagaaggcatcttctccctgtgatggttcatgggtgtgtcagctcaattgtattctgttgtttttgagaatggtggcaatatgcttttgtttgaaaaccaaagaacattccatgtgatattattctccttgatttctgtgatttttctcattgaatacatgttggagaaaaacattgtttttctacttggactgctttgctattttgcatcaagacaaccagtacttcattggacaaatcagaattgcatgtaaaacaatagtgattttcgactgtgattttggcagcaggttttgtgttgaaatattttatctttattttgattctgagcttttgtgtttttagttgttgttccttcaaatatgtagtttaggtataaatgtttgcagatgttccaagcttgatttattaaaatggtttcagtacaaatcccttatgcaattaaatacctattcatggtttcttttttttttttttttttttacaatgaaatgttaacaaatagctttaacataatagcataatagtttagggaaaacttgagtgcaagtggctaatagatatgagctggtgtgatcttatgaaaaaataccattttttctttgctctgattaaaaggtagtgtgtgcgcatcgtagagaattttgaaaacacggaaaggtacaaagcataaatattacttttaagtcccacactcagaaataaacactcaattatttgctatttgttttccaatattttccttaagcttattaatcttgaaattcagaaatttcacctgatttgtctcaatgagagtctctttttatgaattttgctacaatagaatatgtatcatgttactttctgcttagcatcttccttgactagctccccatcagacttaattaaaaaatccaaagtctttaacccagcttacacagtgtacacaaatttcagagttctcgtgatttgacccatgtataggtctacaactttatctccattaaataaataagttggtattttagatctgaaaactcagatgttgttgttcttgatgttttaatgtatagaaatattattctactttttgttctgttatttcctgtccacctatcattcctgtccttctgaagttcctattctgtgtatatttgacccctggtatcgttgctacatgcctttttgccttattttaaaattcatcaaatgatattacttatttgtaatcttagctccagatcatgtcttattgttaattaggttgaacaatttttcccctggaagtattagacaattgcttttgttaaactgatgtcttttcatacctttcccccaatattgacgtgtcctcttattataagatatttacacaggaagaataccctttgcttgtattacataatattttgtcatttgccacctatttaaagtatttttgctataaaatcatttaattttttcatatagtccagtatatatttttgtttaacttcaagatttatttttgaatattaggcctaaaataccttttattattttgcctaataaaatattatataaacatttagctataatatttctggtaatgttcttgttttctttttcagtatgttacttttaaatactgctgaaatttgtgtatagtgggaacttgttattttttcgcaagtgattaaccaattttcctcctgaaatagtaactcagtaatctgataattttcaaatattttgaaatattatgttttaatatactaagttctcatgtgtacttgttagttttctgggccttttcctttttgctagtgatttaccttcctaggttatagcttgtgatatacacttctaaaattatttttattttaatacgttttaaccccttgttataccacatctcagtgattctcatatatttattcttccacataaagagttttgtcattcatgttcttaaaaaaaacttgctaaggttttacttgaaattgagctaaattcttaagtttgggggataaaaatgatgtttatataatgtcatatcttcctatccagaagcatgtttattttttattgttttttttttttaatttggcattatatatttcaattatacagatacagtttatagtttttcttttatctatacacaatctttccggttctctgagtgccccttcttcacatacaaaacctcctcttgtctttaactgaggctctttctgttttacatttccacatttgatcacatctcttcctctttccattcagggtgcatctccgccattccatgtgacatcttttattcttaaaagtactttttatgtttctattttaaatattttaatatatttttccttttgttttaaatcctgtttaacaatatttagaatagaaagctggcattgtctacagtgaattttttcatttccttcaataaaacaattgtacattttgagtgcaaattatttatttctatcatactgcctttgacctttacagtcttactaccagccttgatccctcagtggcctccctaccatgcatacaattttgctcagccaaacgttatagcttttacagctcggcttggatactcatttttctttctttgattctcccactctagactaagtgactgctcactctacactcagggtccagtacactatgcctctagtagttgaattgtcacatttgttcaccttatttagataatttagattccaattttcaaattcatttaatctgtattttaccctttaatattgaaatcattttaataatttaaaacaatgtttttttaaaaaatctggattataacaatgtgatttgtgatttttttctgaaatgaggacagaaaaaatatatgaaattttataaatgtaaaagaatttatggctgggcaatttatggttcatgcctgtgatcccagcactgtgggaggctaaggcaggaggatcccttgaggcccagaatttgagattagcctggacaacatagcaagacccatttctgcaaaaaaataaatagccaggcttggtggtatgtacctgtagtccttgctactcaggaggctggggtgagacaattgcttgaggccaggagtttgaggctgcagtgagctatgatcacaccaacctggtccctggaatgctctccttagaccccatccatgctttctaaattcctactatccttctagaacactgcactccagtctgggcaacagagtgagaccctgactcaaacaaaaaatattatgtatagtcatatgctgcttaatgacatttggttgacaggccacataaacaactgctatctcacaagattataatactgtgtttttactgtaacttttctatttttagatatatttacatacacagacacttaccattgtcttacagttgcttctagtatccagtacagtaacaggctgtatagatttgtagcctaggagcagtaggctataccgtatagcctaagtgtacagtaggttacaccatctaggtttgtgtaagtatgctctatgatgttcacacaatcactaattgcctaatgacacatttctcaaaacatctccccattgttaagcaacacatacctgtttgtcattacttgtccaaacatggcactcaggcatgtacaataataatcaaatttagtactttttgttgttttgccaactttcaatcatacaaaattttgaatttaaatatttaaaacattgttattcagactacatacttgtcaaaatagaaagatcaaatatatttcatttaatgaaatgttagttgaacttataactgtaacatatttagacataggatctgtggatgtctatttgtgtgttgggtgggaagaaagatgatggacaagtaaaattgtttttgaaccttctgtagattttaatatagcagtgtggatgttgatatcctggtgggaaagaagcgcctgctgtagaaataaaaatttggagaaagtggtgtccatatctgtgtgtgtgtatttccccagtggttctgtttggaacacttccaactatttttcaaaatgaaaatggtggccagggtacttgtatattgtatataggtaattgttattcactgttccaaatgctgctgaatctttgcttttttttttttttttgagacagagtcttgctctgtcacccaggctggagttcagtggtgcagtcttagctcatggaacctctgcctcccagattcaagcaattctcctgcctcagcctcccgagtagctggggctacaggtgcgtgccaccatgcttggctaactttgttttgtatttttagtagagacggggtttcaccgtgttatccaggatggtctcgatctcctgacctcgtgatccacctgccttggcctcccaaagtgctgggattacagtcatgagccgccacacccggctgtatctttttatattttagtatttgagcagatacatggagaagctgttgggccataccatttgggtgacaccaacttatgctggagaagccctttttttagttgcatgtgtttaaggtgtacaaaattttgatacccatatatgtagtgaaataattactgtagtcagtcccattaaaatattcatttcctcacatctccttttttattttcatttttttttagtgagaacacctgaaatttactttcttagcaatttctaatgtataatacagtattctttaaagtatagccctcatgttgtacattaaatccctagatgtatttatcttacctaactcaattttgtgccctttgaccaatatcttcccatttttcccacctctccatccttggaaaccacccttctaccctatgtttgtacgtatttgacatttttggattccacataatgagtcatatcatgtagcatgacttttctgtgtccagcatttatttcactaataatgtcctccaggtttatccatgctgtcacaaatttcaggctcccatctttttaagactgaacaactttactctgtgtttatgtgtgtgtatgtgtaaatatatatatatatatatacacacataatatatttatatatatatggtgtgtgtatgtatatatatatacacacacacatatacacacccccaatgtatatatacaaacaatatatgtataatacacaatatatatacacacacacctttttatatatatatttttttgtttgtttgtttgtttgtttttttgagacagagtctcaatctgtcgcccacactggagtgcagtggtgcaatctcctctcactgcaacctccacttcccagattcaagcaattcttctgccttagccttcccggtagctgggattacaggttcccatcaccacgcccagataatattttgtatttttagtaggggaggggtttcatcatgttggccaggctggtctcaaactcctgacctcacgtgatccacccacctcagcctcccaaagtgctgggattacaggcatgagccactgcacctatatatatatttatacacacatagagtaaggctgttcagtcttaaaaaagatgggagcctgaaatttgtgacaacacaaataaacctgaaggacattattaggatatatatatatatatatatcctaacatacatatgtctgtgtcacaatacctctatccatttatctatcaaaggaaacttgggttgtgtctacatcttgaccattgtgagtaatgctgcaaggaatatgggagcacggaatcttttctgaggtactgatttcgtttcctttgggtatatacccagaagagggattgctggatcatatggtagttccatttataattttttaataaatctccatactgttttgcataatggctgtacaaatttacatttccaccaacagaatactagagttcccttttctctacaacctcagcaacacttgttatctcttgactttttgataatagatatcctaatgagcgtgaggtgatagctgattctggttttgatttgcatttccctgataattagtgttgttcagtacatttgcatattggttatttgtatgtcttcttgggaaatcgtctttttaggttctttgctcatttttaatagggttatattttttttgctaatgagtggcatgggtttcttatataattagaatatcaactttttattacatatataatttgagaatttgttttcagactccttaggatatctttcattttgttgatcgtttcctttgctatgctaaagttttttagtccagtgcagtcccacatatttgtttttgcttttgttgccttaagcttttggtgtcatatcaataaatcattgtcaataccaatgtcatgaagcttttcctctgtgtgttcttctaagagttttatggttttaggtgtaatgctgtaatccatttccagcttattttcgtgtatggtgtaatacagtggtccaattttattcttttgcatgtgaacacccagttttctgattgaagagcctatcctttccccatcacgtattttggatgctcttgtcaaaaattagttgactatgtctgccagggtttatttctgagctcttgactttgctccgttgatctatatatctgttttcattccagtaccataatgtttagattattatacatatgtaatataatttgaaattaggatgtgcaaaacctccaaattgttcttcttcctcaaattgctttggctattcatgattcatttctggctttgtacaattttttttttttttgcctatttctgtaataaaagtgccattggaattttgatagggattttgttgaatctatagatatctttggataatatgagtatttttacaatattaattcttccaatccatgaacatagaatttcttcccatttatttttctctttaatttcgttcatcagtatttgatagtttttagtatgtagatcttttatctatagttaaatttcttactaagtattttattttctgatgctattataaatggaattattttcttttggaatagattatttttagtgtaaaaaacactactaatattgtatgttgattttttatcctgcaactgtattgaatttgtctattagtctaatatttgtgtgtgtgtgtgtgtgtgtgtgtgtgtgaaatcttagggcgttctatatatgggattatgtcatgtgcaaagagagataattttactttttccttctcaattttgatgcctttgatttcttgttcatgtctgattgcttttgctagtacttccagtactacattgaatagaagtgacaagagtgagcatccttaccttataccagagagtatagagtacgatgttaactggagtttttcataaatgttctttattacgttgatacaactattttctatactcattttgttgacagattttatcatgaatggatgctgaacattgtcaaatttctatatttattgaggtgattatgtggtttgtatcttttattctgctaatgtggtatatcacattgattgatttgtgtgtgttaaattagtcttgcattccagagataaatcccacttgctcacactgtataatattttaaataagttgttgaatttgatttgccaacattttattcaggatttttgcatgtatgtttattagatattggtctgtagttttcttgtgtttttgtctggctttaggatcagggcttaatgaaatgggtttggaaatattccctcgatggagaagtcttttctaatttagttttcattaatcacaaactaatagcatttttaaaattctctatttttaaaattctcttttactgatgccttttctggtcagaactggaatgactatactgcaagggaatagttatacacttggagtttaaatgaatataaacaattagctgtgctaatggcaattatgctaaagtgcacttccattatattctcatctgtttaatggcagttttcaaaatctaaatatgtgtaaggggcatttgcctagcatgtttgattaattttattttaatagcaattatcttaagtaaaaaaataatgtaaatctgtgcttgatgtcttcccagaggttaccaaagggtctttatacacaagtgaaatgggttttatactattctggagtcaatgttctgtaatcttgaaatagtatgcaaatatgccagtcctaggacacttgtttctatgcatccaattccggatcttttactttttactgatttgtcctttaaatttgcaaatctagtctgtgttcattaatcagccaatgaactgatgataccttcagtcatagttttgcgtatgaataacccaagtttataacgtcattgattaattcagttaatatgtggggcaagcctctcacatgtgccaggtactctgcaaggtatgaggattgcaacagtctcttgccttcacagagtttcaaatctgatgacaaaagtcaacaatatacaaaaaaacaaaagagtctcatctgtgttgcaataaaaacaattgtcttaagcaaataattagaaagcacttattccagagctaggaggtcaatgtaggcttttcagaataattaatatctaggttcatacctgactggtgagtggaaagagtctggcagaggaacaagaaagagatgggcgatgagaaaggacaggagctgggagtggcaggcagggacacactgcaaaagacataagttaagtaggaaacataatgatctaggcaacataggacagtggccttactgaagtttgtatcatggaaatggaaaagtgaatggattcaagagctattcagaaatctaaatatataggattttgttatcaatttaataaaagagagagagaggaaagagtacagcatttctcaaacctttccaaacataaagataactcaaaatgagtctttaatacatagattctcagcccaacttcaggtttcctaaatcagaatttcaggggattttgtgtttagcaaagctgttgatcagaaactattgaaaaaactggaataaaggatgatcgtgtcttttactcgagcaaatgaataaagctaaggtattaaccattataaaggacaccagaagggagggactagtgaaagggatatggaatgggtaaaaagatggcattgatcttttgatacattgtgttttagcagccttctgggacctcaaaagagagatggcttgcaggcagatggaggtgctgatcctcaggggagtgatctggttaaaagataaagccttgagaagccagcaggttataataggtggttaaagccttgagaagccagcaggttataacaggtggtagtaaaggtggatgtagctgaggctgttagagtatgtagagtgagaatagaagaggcctacaaccatttaagtagagtagaagaaatctctgcaaacaacactgagaaagggcaaacagagtattcagggaaaaaataggttcgttgtaccaagaaaacttctcctaagacaggagaagaatgtcattgacagtgacaagtttctagtacagataggaaagaaaataagacattaatacaggaaggaaaataagacattatctcttacatttagcagtaagaagtttaatagtgccagaaatgcatttgagttctctgattagtacaagaggccttcaaaaagttcatagaagatgagtactatgagaaaactatgcatggattttctttttttttttgcaccaaaattaccttgtactaacttgttataacacatgtgaacaagatttagtttgagacactaagaagaataagatatcagtttgaaaagcgcccctacagacataagattgaaaaaaaaaaaaaagcaccttttcgggcaacatgaattcagctaaaattgaaacaaaaacaaacatcaaatttgtggtgaaatttgtgttgcagaatggtgaaatcattgatgctttacaaaatttcacgaggacaatgccccaaataaatctgcagtttacaaatagatagctcattttaggaagggataagacaatgttgaaaatgaagtctgtggtggcagaccattcacatcaatttgtgaggaaatggttcatcttgtttgttccctgtttgaagaaggctgatgattaacagcacaaactatagccaaatccacagataactcagttggctcagcttacatacaattcttactgaaaagttaatgttgagcaaactttgtacctgatgggtgccaaaattgctgcacccagatcagctgtagacaagtgcagagctttcaatggaagttttattttattttatttttatttttaaaatatatttttattaatttttttattgctataagttattggggaacaagcggtatttggttaggtgagtaagtttttggtggtgatttgtgagactttggtgcacccatcacctgagcagtatatattgcacccagtttgtggtcttttatctgtcacccccttcccctcctttcccccagagtccccaaagtccatcgtgtctttttcttaggcctttgtgtcctcatagcttagctcccacacgtgagtgagaacatacaatgtttggtttttcattcctgagttacttcacttagaataatagtctccaatcttatccaggtcgctccgaatgccattaactcaaccttgaaaaaaatcatgccatggcagagaaaaaaatattggtgccagatggaccataataatcaatatatgttctaatatgttagaattttggtaaaatacaattttaccttttatcatctctattgcctgtggcttctcatttttgttaagaaaaccaccgtgaggaagtgacaatctcatacttactgtttagtgctgtgctctgccacgagaggatgattttagacattattattttatattttgggtgttagggttttgatatggtttggctcagtgtccccacccaaatctcatgctaaattgtaatttccagtgttggagaagggacctggtgggaggtgactggatcatgggggcagatttcccccatgctatactcatggtagtgagtgagttctcatgagagctgatagtttaaacatgtgtggcacttccccccggctctctctctcctgccaccatgtgaagaaggtgcttgttgcccttcaccttctgccatgatcataagtttgctaaggcctcccagtcatgcttcctgttaagcctgcagaactgtgaatcaattaaacctcttttcttcttaaattacccagtgtcaggtagttctttatagcagtgtgagaatggactaatgcagctttctattggcactttgaacacaaggtacttgcatgtgcatatatgtatatggtatatgcatgtacacgcttacacttgagttttgatttatattccagcaaaagggtaatagagctatattcctctcatttatccacttggacttcttgataaatgtttgctattaactaatctttagtaattctgtataatacctctatctccaacctacataatcatcatcatcatcatcattttaacaatagcaagaattcacctaaagaatattgattcaagaaccatgtaatgtgcttcatattcattatatcatttaattactcaatgcacctcttaagtattttaccccaaaaattcttaccgtagttataaaggaaaaataacagtaaatcctgtcgatatataagctataaatatataatcactatttataacttataaaaccttcaaaattcaacctccaataaaaccagtcatacattttgctgataaatgtcacaatttttaaacataacataaaacaagaacttaatttccaaacaggtttaaatattaatttatgggcaccctcaaataatggcaacagctccttccaacctctactatctctgcaaagaagctgtgcttaaattgcaaatcattttcttaatctagtctatcattgttggacatttgggttggttccaagtctttgctattgtgaatagtgccgcaataaacatacgtgtgcatgtgtctttataacagcatgatttatagtcctttgggtatatacccagtaatgggatggctgggtcaaatggtatttctagttctagatccctgaggaatcgccacactaacttccacaatggttcacactctggggactattgtgtggtggggggaggggggagggatagcattaggagatatacctaatgctaaatgacgagttaatgggtgcagcgcaccagcatggcacatgtatacatatgtaactaacctgcacgttgtgcacatgtaccctaaaacttaaagtgtaataataataaaatttaaaaaaaattgcaaatcatttttatcaacccattaaaacagactctccatcaggcagtgcttggcctgcttccactcagcttgtccatgcacttgaacattaaagaatcatacaaatccatctctctatattaccttagaaagtttctcaatataacgggaagagataaattattttttaagagctagttgaagtttgagctggttgagctgtaaggctaatgcagaagtcctcttattatagagagaatttctttttttgttgggtgagaaatacaagggctacgttggttatgaacataagtcctactctcaggctagtctaacatgaagaaaatttagacaaatcatgtagtattctattgttattgcctcagcaaaaccacctctcactttttctgacaatatccccaaactttatctggggtaccccttaactttttatttctgtgatcctgctgtttgcctgcctagggctgaggcagttactcgggcttaagccatggctaacatggttgtttgcattggtcatggtgagtccaataggaacaaacttcaggactcttataggatcattggaaaaggccctgtttctttcccacttcatcgtaaggagaaagcaatgatgatagtaatagaaagagtaacagtgcaataacaaagagacactctctatgtagcagtccatgcagcatgtagcaccatgttaaacccaatgcgccttgtctcttccaacgttcacagggtactaagattttcccaatattacagtcagaaaactgggcctaggtgggttaaattaattgccagcactccacacagttttctatgactccagaggtgaggcttcacaagttacattggagatcctggcttgagactgttcccgagattcatagatatgtcaaagattgatagtagttccaatacctttgactccaccgaattcagaatgaatcaatacattttaaaatgctatcacttaatatatatggcaagagatgacaagtttggcaaaatttctttaacatttaaaaatttgtctcacttgtcatttttcttcctagatgaaatcaaataattgattagactcatttttgtattgaagaagtgaaaatataagctttcttttgcaatatagatatgttttcccacaagaccacatgagcacttctcctaagtacaatggagagttgaaccaatctattagatgtccagtgttctttaggtgcctctagtatgagtttcctttcaccactgaagtctcaatcataacatggccagttcacttcctacatgaacatagactatggggattgaggctactgtccatcacatggagcctaaacatagaagcaatacagaggaaccagaatgaagtcatggaaaaagggcacatggtctcagtcaccacttgaccctctgtactcaagttctgtgggaaaccagctgtgctccagaactttttggttatatgaaacaattattccttttttttttcctgaggtcatttttcactgggtgttctgccacttgcaaatgtaaacacaataatactaaagtagatgggattttgaatcttgtcctttttgcacaggggagacaaaaatttggaggccccaaattctgaaaatagaaagctaagaatggagaaaattccttggaggaagacgagaagagtagcatgactttaggtaactggagaaagatttcctatggcatgaggagagtgtggacaaacacatacttgtaagatgtcatctgttcggtgctactccaaatttctaatgcaagtctaccatacccaaggagtctacctaaaatagcattaaaagaagagcacagtataggaagtgtactgaccatattgtgattgagaattcaatggggtaaggaaattcatactggaggtacccaaaaaacactggccaactaatagattgggtgaaccataattgggagaaaggcttatgctgtcttatgagaaaatatatctatattgcaaaagaaagcttatattttcattcttcaatataaaaatgagtctaatgagcctaatcaattatttgatttcatctaggaggaaagagaagttagacaaaattttttaagtgttaaattttgctaaacttgtcttctatagtattaagtgacagcatttaagcatatattgattcattgtgaattgcatgggtcaaaggtatttgaactaccatcactctttgtcatatttatgaatctgaagtacagactcaagccaagatttcctatgtaacttgtgaagcctcatctctggagtcatagaaaattgtgtggcatgctagcaattaatttaacccacccagactcagtttgtgactataatattgggataatcttagtaccttgtgaacgttggaagagacaaggcacattgggcttagcatggtgcctggaacagctacatcgagaatgtttctttgttattgtgctatggctctttctattactattaccattgcttcttctttacatatttaatttaggcacagctttggtgaattgggaattctgaaactttggattttattcaagttattattattagctatccatgtgactcttggttctctagacctcaatctctgtatttctaaaatgagagataacgaatagtctcttacatgcttttcaggtctgaaatatctgggatgcctcatggtatctgtgtatgtgtagggtcatgcatctttatctctctgctagtccatagtacctattcaaaaaacaacaaagacacttgaaatgatgacaacccagtgtccttttttcaatgtgttctttgtagtgcgcagtgtgtttcgttccacatattttacccaaatgttggagaagctaatatgttcacaataacactgtgaataaatcacagtcatgattcagagtcagaagttgccatgaaactgaaatatctgcttctgtgttcagcagctattaatctgtgctccaggtaaaagcctccaatgttgaaatgaaggaaaaaatgttaagggaagccagagagaaaggtcaggtcaccttcaaagggaagcccatcagactaacaatggatctctctgaagaaaccctataaaccagaagagagtgggggccaatattcaacatttttaaataaaataattttcaacccagagtttcatatccagccaaactaagcttcataaacgaaggagaaataaaatcctttccagacaagcaaatgctgagggattttgtcaccaccaggcctgccttgcaagagctcctgaaggaagcactaaatatggaaaggaaaaactggtaccagccactgcaaaaatacaccaaaaaaaaaaaccaatgacactacaaagaaactgcatcaactaatgtgaaaaataaccagctagcatcatgatgacaggatcaaattcacacataacaatattaaccttaaatgttaacaggctcaatgccccatttaaaagacacagactggcaaattggaaacagagtcaaaactcatcagtgtgctgtattcaggagacccatctcacgtgcaaagacatacatgggtcaaaataaagggatggaggaaaatttacagcacatggaaagcaaaaaaagcaggggttgcaatcctagtctctgataaaacagactttaaaccaacaaagatcaaaaaaagacaagggcattacataatggtaaagggatcaatgcagcaagaagagctaactatcataaatatacatgcatctaatacaggagcacccagattcataaaacaagttcttagagacctacaaagagatttagacccccatacaataatagtgggagactttaacactccactgtcaatattagacaaatcaatgagacggaaaattaacaaggatattcaggacttgaactcagctctggatcaagtggacccaatagacatctacagaactctctaccccaaatcaacagaatatacattcttctcagtaccacatgacacttattctaaaattgaccacataattggaagtaaaacattcttcaccaaatgggaaagaatggaaatcaaaacaaactgtctctcagaccacagtgcaatgaaattagaactcagtattaagaaactcactcaaaactgcacaactacatggaaattgaacaacctgctcctgaatgatccctgggtaaatactgaaattaagcagaaattaagaagttatttgaaactaatgagaacaaagagacaacataccagaatctctgggacacagctaaaacagtgttaagagggaaatttataacactgaatgcccacatcagaaagctgaaaagatctgaaatcaacaacctaacaccacgattaaaaaagaactagagaagcaagagcaaagaaattcaaaagctagcagaacacaggaaataactaagatcagagcagaactgaaggagatagagacacgaaaaacccttcaaaaaatcaatgaatccaggaactgtttttttgaaaaaattaataaaatagatagaccattatcttgactaataaagaagagagaagaatcaaatagacacagtaaaaaatgataaaggtgatatcaccaatgatcccacagaaatacaaactagcatcagagaatactataaacatctctatggaagtaaactagaaaatctagaagaaatgggtaaattcctacacacatacaccaccccaagactaaaccaggaagaagtcaaatccctgaatagaccaataacaagttctgaagttgaggcagtaattaatagcctacaaaccaaaaaaaggcaaggaccagatggattcacaaccaaattctaccagaggtacaaagaggagctggtactattccttctgaaactattccaaacaatagaaaaagaggggctcctctctaattcattttatgaagccagcaacattctgatatcaaaacctggcagagacacaacaaaaaaagaaaacttcaggccgatatccatcatgaacatcagtgtgaaaatcttcaataaaatactggcaagatgaatccagcagcacatcaaaaagcttatccaccacaatcaggtcggcttcctccctgggatgcaaggctggttcaacatatgcaaatcaataaatgtaatccatcacataaacagaaccaatgacaaaaaccacacgattatctcaatagatgcagaaaaggccttcaataaaattcaacatcctttcatgctaaaaactcaataaactaggcattgatggaacatatatcaaaattataagagctatttatgacaaacccatagccaatatcatactgaatggacaaaagctggaagcattcccttgaaaagtggtataaggcaaggatgccctctctccccactcctattcaacacagtattggaagttctggtcaggacaatcaggcaagagaaagaaataaagggtattcaaataggaagagaggaagtcaaattgtctctgtttgaagatgacatggctctatatttagaaaacttcatcgtctcatccccaaaactccttaagctgataagcaacttcaatgaagtctcaggatacaaaatcaatgtgaaaaaaacagaagcattcctatacaccaacaatagacaagcagagtgccaaatcatgaattaattcccattcacaatcgctacaaagagaatgaaataattaggaatacaacttacaagggacatgaaggacttcttcaaggagaactgccaaccactgttgaaagaaataagagaggatacaaacaaatggaaaagtaatctatgctcatggataggaagaatcaatattgtgaatatggccatactgcccaaagtaatttatagatccaatgatattcccatcaagctcccattgactttctttggataattaggacaaactactttaactttcatatggaactcaaaaagagcccgtatagccaaggcaattctaagcaaaaacaacaaagatgaaggcattatgctacctaacttcaaactatactacaaggctacagtaaccaaaacagcatgatattagtaccaaaacagatatgcagaccaatggaacagaatagagacattagaaataacaccacacatctacaactatctgatctttgacaaacctgagaaaaacaagcaatggggaaaggactctttatttaataaatggtttggggaaaactggctagccataacagaaaactgaaactggaaaacttccctacaccttatatgaaaattaagtcaagatgggttaaagtcttaaatgtaaaaaccaaaaccataaaaccctagaagaaaacctaggcaataccattcaggacagaggcatgggccaagatttcatgaccaaaacaccaaaagcaattgcaacaaaagccaaaaccgacaaatgggagctaactaaactaaagagcttctgcacagcaaaataaactagcatcagagtgaacaggcatcctacagaatgggggaaaatttttgcagtctctccatctgacaaaggtcaaatatccagaatctacaaggaatgtaaacaaagtcacaagagaaacacaaccccatcaaaaaggatatgtacagacacttcgcaaaagaacatatttatccatccaaaaaacataggaaaaaaaaaagctcaacatcactggtcattagagaaatgcaaatgaaaaccacaatgagataccatctcatgcaaatcagaatggcaattattaaaagtcagaagaccaggcgcggtggctcacacctgtaatcccagcactttgggaggccgaggtgggcagatcatgaggtcaagaggttgagaccatcctggccaacactgtgaaaccccatctcgactgaaaatacaaaaattagctgggcatggtggcacatgcctgtagtcccagctactcgggaagctgaggcaggacaaccgcttgaaccaggcagacggaggttgcagtgagccaagatcgtgccactgcactccagcctggtgacagagtgagactctgtctccaaaaaaaaaaaagtcaggaaacaatagatgctggtgaggctgtggagaaatgggaatgattttacactgttggtgggagtgtaaattagttcaaccattgtggaagacagtgtggcaattcctcaaggatctagaaccagaaataccatttgacccagcaatcccattcctgggtatatactcaaaggattataaataattctactataaagacacatgcacatgtatgtttattgcagcactgtttacaacagcaaagactggggaccaacccaaatgcccatcagtgatagactgggtaaagaaaatgaggcacatatacaccatggaatactatacaaccataaaaaagaatgagattatgtcctttgcaaggacatggatgaaactggaagccatcattctcagcaaacgaacacaagaacagaaaaccaaacacagaatattctcactcataagtgggagttaaactataagcacacatggacacagggagcagaacgacgcacactgggcctgttgtgggaaggagatagagaacagtaaaacaaatacctaatgcgtgcgggccttaacacctagatgatggttgacatgtgcagcaaaccatcatggcacttgtatacctatgtagcaaacctgcacattctgtacatgtatcccagaacttaaagtaaacttagataataataataataataataataataataataataataatacagcttcaattttcccttctgccacctctagtaaaaaatgtattaggcatgctaagaaaacagaaagaaagttgttttttttttttttttaaaaaaagggcaggataaaatggaaaaactaagtttatgttaaattaatttctgaagtaagccatctctttgaaactgctcctagcaactttccatcccccttctactctccacctccaatccccaggctttaaataggatgaagggttaaaccttttactggtgaagaagtatttatgtgcatttagtgaagagagaaaatattttattagcagactgctgctggggaaaattggtcctcttgatatatgtgagaaagtaaatgtgtccctttcacctgaaactgctacatctaagtctactaacttcaattgtcttgacaaaaatgatttaacaaagtagagaataatagggggacctaggaggaggattctagaggaaggaaaaagtactgcaacatctaggccttaggcccttcaccatgagaaaccttagaaatggacctaaatagcatccgagagggtgaggtactctgggagatttgtctgtgagaaaatgataggtttcacatttaataagatgcagtctttcagtttccgctgaggcaagacataattttgtttttagttcagttggatcatttccatcagcttgccaacatggaatgagatcccgtatggacaaacaaacaaaaacaattccacgatccctgcatttacccaacagtatctaagcttctgataaattcttgttaaatgaatgtatgaaacaaaaacatatactgtgaatttatgaaaatgttaactagaattccatttgaaagttgatttgtggtcaggtgcggtggctcacacctgtaatcccagcagtttgggaggacgaggtgggcggatcacgaggttaggagttcaaaaccagcctggccaacatggtgaaaccccgtctctactaaacgtacaaaaaattagccaggtgtggtggcaagcacctgtaatcccagctacttgggagactgaggcaggagaatcgcttgaacccgggaggcagaggttgtgaaccactgcactccagcctgggcgacaggacgagactccatctcaaaaaaaaaaattgtgttgtttctgtttctttccttagttctatatttctaacgtctttaacactattgtcaatgagtagtggaatagtaattactttacatagaccaggaatgactctatcctctctttttgaatgagataggaaaatgattttctggaagttggaaagtgacctgaagttgcaaattctggccagcagatgtgaccgctatctgaaggtttgaatttgttatcagcaaggaaaactgagaaaattctgttagatgtgttctgaataacttttttcctatcttaaagatctgttctatcaacgctgggagacacaacatggcaagacagcagattattgcacagaagggactgacttctgtatacaggacacagaaatgtaggtctccacattttccttgtttatattgcctagtttatattgtgctagtttatactgcctacctgtgttctgtagaaaatgaatctgcccacccttgattatgtcagaggtgttgttgtttgtaatttgtttggacaaattccttagccaatttcataaaacaaacaagtccagtaatgtaggatatatatggacttttaaaagtctggatgaaatttcaacagaaataaaatgtggggctattactctccagttaaaaagactaaacttgcgcgcacacacacacgcacacacacccacatgcgcacgcacacgcgcgcacatgaacacacacacgcacatgcacacacaagcacacatgcacatgcacacatacacacacacgcacacatgtgcacacacatgcgcacacacccacacacgcacatgcacgcacatgcacacgcacgcgcacacatgcagacgcacacacgcacacacacgcacacgtgcacacacacaatgcacacacacacgcacacaatgctaaattgacagaacagcaaagtgttgatgactgagaaaaacggttcccatccactgtctccatggtaatgcctgctttttaaaaagggtgctttataaattaatatacatttaagaggaaaaaggcatacccattagaggaaagattacaagggtttagttgggttctgctttccaaccgatccttctttttggcattagtgctctgaaccctggcgtctcttttgaagagagtgagggagcaaatccagttcttgaccttggaacttaatatttccttatttccagcttccagtaccatttaaattttatcatatttttaccttgttaaaaatgcctgagatttcaacagagtcttactgggagcttttgattgttagcatttatcagttcagaaaattacctgtttgtttgtttcttcttcccatttttgaggtgaaagttcagcacatgaattacataataatgtcaggaagtaggccatgatgccttgcttttagcagttgacatttttgaagttcctgggatgaaaacgttgcttcaagtcactctgaaatgtgcattgtattgaatttatgcatattgatttggcacttggttagcctccttgaaaatttggaccatttttcaaagcttccttttttgagttactcataagtcaggagtttttcatctctttttgccaatcaacatttagcctctcttgttattttctccaggttccatgatttttataactcaatatttatgagtgatttaaatctgagtttctcaaaaaatgcaatattgtatatattgctcaattcattccccaaatgtaaacaagacctaaaatacggatgccatgtttcagtatggatacattcccaaagttcatatctttgcaaaaatatttatcaaaaagtttactgtaagcacacacacacacacacacacacacacacacacacatacacataaaaaagtaagaaaggtacaacaattatccttttgcatgagaagaaattcgtgttaaattatccatgcctttcatagaacgcttccagttgcaaagttcctctttttttagcattataaaactccacagattatcccttgctctcaaacatgcctgtgtgtatgtttataataacagaagggaaaatgtcctttggacaggagacttgcttctcctggggcttgagttctgtgaagcagtgccagcaacctcacatgcaatgatgatttgtacttaagccattagcttcagaaacacctcccaggagcagtctgagaccaaagccctggtttcctgtgcggtgtttgctgacattcttgtacagaatgcttgttagaggcattgtcatgcatttccaagggaccttaagaaataataaatccgtaccacctcgctactgtttttatgaataaatgcccgttcctgaccttatcttttggcaccgcctggcaataacttctccacacctctgtactatgggtattgtcaaagaaaaagtctgtacggttttattctttagagaattattccaactccctcaggcatttcctaggatgaacaattctgcgcagggataaatacaggctgataaaaatgggtcatcccacaatgcaatttttcccaagaaaagccagaaaacaaattggggacactgtgaaccctgatccagacgtaagtcagtaagaggatgttataaaagtgaagccaacctatggttataaataatcgcctgaagtagaagtgaaaatgccattatggcaagagccatcacccatagcctttggaagttctgtcctctctttacagtgtggatctgttaagtttgccttattttttgctgccaccctaactactcctgtattgttaataatagtcaaagcactaaggtttgcaaatgtttcatatcctaaaagtaataaattaagtcctgccacaattgttagtgccatttgtcctgtccatccaatgaatgaatgaatgaacgcatttatgcatgagtgagaactgcctcctttctgtaggactgattcttaaagtagcttccacctgccatgggcacccttctctgagcaatcaaaataggatgggttcaactcattccaaactggttgtctaactcttctttaaaaaaagtcattatttttcataagttttcaacttgtacacatcaactgatattgtttatactatgaatttaaaagatataaacacacatgcaagttacatcatgtttgcattaactttcaaccgctgtctttaccacaattcaaatattcttaacagatatagaaaagaaccttattttcatcatctccttttttttttttttagctgctctgtattcctgctttatggggacttttttctcgccctatattgtcctgattaaggccacagaagttagtcagccacaggctagggcagtcatagaaacttatttatttggatgtaaccaagtaaccaaggccaagccaatctgtctttatctagaatatttcaagctggaatttgagttccagtgtctctagtgcttgtgttatgtggtataactgtgtgtgctaagagttattttggctatcttcccagatgaatggagaaagtatcatactaggagagaatacaactaagtggtccaaagaagcagagctgaaagagaatgggagaaaaaatatactattttgaggtactgtaggcaattgtgcttgaagtaaactcctcagttctataacacactgagtttcattttttgctgaaataagtttgagttttgtttctgtcatttgcaatcaaagagcactgacatccagaacacatttcacctgacttagagggcctggagagtatgcccatctctaactcccccaggctgcccatctctaactcccccaggctgcccatctctaactcactcaggctgcccatctctaactcccccaggctgcccatctctaactcccccaggctgcccatctctaactcccccaggctgcccatctctaactcactcaggctgctttgtgcacttagggttaaaatctcctagggctttcctcctcctctctctcatggaaatgattatatcattgttagcttaccagttgatgatcatagtgagagttatatctctggatctctttggctaatctaaatgtccgtctttgtgcttccaagcaatgagtgaaaaaccctcccttcatctggcctttcttatgtgcaggtttctcctggtagaggcagaaaaggagaagagacattttcatccctctacagtccatgagatttatctcaactcttatgtactaaacagaagaaagttacgttggtgactgttctttcctgtgatttctctttcaaaagtaactctttgtataattatcttacattaaatatattaatttttttagaattaagtatgtaacagcaaaagggctaccataagtagctccatttttgtgtatggggcctttgcccatttctgaatgtaagctgggataattttagagcactgagatgcaatcatgtagtctttggaaactaactctgggattaaaggaaaagtatgtagtaaatgactagcactgctttgttgaaactttctaggagcattgggacctgaccagggacaaagaagttcccagctcccccggaccctcactggtgcccagatgtctgtgattgttgatcgtgtccagaacccaaccccattcccctcccccttcccttaatgtaagacgagcctggctggcacagtggcttacgcctataatcctagcactttgggaggccgaggcgggtggcccacctgaggtaatgagtttgagaccagcctggccaacatggcaaaaccctgtcactactaaacatacaaaaattagctgagtgtggtggtatgggcctgtagtcccagttactcatgaggctgaggcagaaggattgcttgagtccaggaggtggaggttaccatgagtccagatagcaccactgcactccagcctgggtggcagagcaagaccctgtctcaaagcaacaacaacaacaacaaaaacaaacaaacaaaaaacagcctgaaatttgtccttgtcctgacttaagatggtactttaggatgctagttcaccttcttggtttgctggctttccacataaacctgcttttcctccccgcaactctcatctcttgagttctggctctccagtgtcaaacacctgaatctggttttggctacaagtgtattggctactccttatttatttatttatttgtgacagagtcttactttgttgcccaggctggagtacagtggtgctatcttggctcactgcgattcccgggttcaattgattctcctgctgaggcaagagaatcctgagtagctgggattacaggcatgtgccaccatgcctggctaatttttgtatttttagtagagatagggtttcactgtgttggccaggctggtctcgcactcctaacctcaagtgatctgccggtctcggcctcccgaagtgctgggattacaggcatgagccatccttataagcatatttttatagagcctttgtctctctaaaaaatgtgtgtgtgtgtgtgtgtgtgtgtgtgtgtgtgtggtgtagtgtgtacataatttatctttttaaaagagaatgttttcaataagaaattcacagtggtttactcacaaccttattagaataggtttctcagtttgaggctcatgacattgttgaaaaatgatgaagcttatgaatatatgattcaagcatagtttctcaaaggctggtccatgaactggctgcattaacattcttttatgaaacttcttaaaaatactgattcccaagaactatctgctatcatttattagatctatgttcagttctgagactccatactactttaaaaaaaaatctttccaggttatctgaggtatttcctttcaagatttttaaacactaattttgggaagggagaaagtaaatggtaagtaggtcagctaattgagcctgtgaaaaaaataataaatttgaattaagcatgagcaagaaacaaagctgggttcattcatgataggtagaaaaatttatcatattgaaattgcatctttcatccacaatgactcccacatgaagacatgtacttggggtgggaagtggtgtggtttggtcgcaaaggcaacttgaggtaatgcaatgatgtaatgagatgctgggtcatgaattagctccagacaagccatgtgtctctgatataagccacttaacttctctgaacctcagtttctcaactgtaaagccccgaagcgtcaataaccacttcacagtatttttatgagggctagaataaatcatgcaaggaaatgtgctttgaaaactgtaaataagttatgtaagtccaagttcttactactaagaagtagctggttgagaggactgctccatacttaagaaggctgaagtgacgtgaagtgaaggagcaggtgtcttactttctgtttacaacagtgttgatactgggtagtttgtttctatttatttgaggtcatggattcctttgtgattcctttataattatagacaaattctctttctttttaaaaatgtcttaatttttaattttgtgagtatatggtgtgtgtatttatggggtacctatgttgatacaggcatgcaatttgaaataatcccatcatggagaatggggtatccaccccctcaagcatttatcctttgtattacaaacaatccaattatactttttgagctattttaaaatgtacaattaagttattattgactatagtcaccctgttgtgctatcaaatagtagggtacaaactctctttctgaacattgcccatgtgcataaaaataagaaatttttgaagacaatttttggttattatgtactaggttaagagctctgtgttctcttttcatgtgcccctttcttcattttttttttctctccattacttgaatgtgagcttcataagcacatgacttcaatttgcttactgctgcattcgcagcatcaattacagtgcctggcttatagcaggaacttcatagctacatactgaacccatgagtgggttccagtgtgcacaggtacaaagctaaggagatgaaccatacacagccctgatgaccaaggcttctggtggagggacagtccaggcagataagcacataattgtcaaggaaacattggtaagacatctaccaacaggcaattatgatgtacttgagatatattacagaaggaatgaccaggagttgacctttgaggagggccttgagtgtggatgtcaaatgtagaaggagttagggaataaattccagagttatacaatagctcaagaaaactgtagaaaacatttaataatgggtcagaagttgaaaagtagctgctccgagaagttgaaagtcatatgctttgttgaacctccctgatgtttttaaaaatgagaactattgcctaaaaatataaatttctgcctcctcttgaacggtaagcacatatagcaagtctgactccagcactggagtcaaacaatagctgcccccttttgatgaggtctgtgttctcctcttagcccccagcccacatgacttgcttatgggacagcttgtgcatgtaatcccttgagtttgtgtaccctggctcagaaagtcttcgagcacttcagatgccctcatctttgcaaaaggggtatttatagaataaatcctatggtagaaaatcacagatagagtcactgtatgttgggagcttgctattgaagattaacagtgctgaagtaggtgaacatagaacaaatatattaaaaaatgtaatagatacctatttatatgcaacagtatgaatgattataaattaaatggtattgatagaggcagacatgatcattgtaggtgaatacctggtaaaggagtggccacaaattttggagaggagattgcataaaagagggtggtttttattagtttgcttgttttgagaatttatttgtttaattcaatggttgtatgcatctctcatggactgatgaattctaatatgtcaatcatcatgttaattgacctacctaccactgccaaaaaaaaaaaaaaaaaaatgctagtggtactcatagcctaaccccaaacaagagagacaacacataggagaaagattaaaaacctcagtaggcaggctagaggaggagaaagtaatttgctttgacctaggcaataaatctacctggcagtaatgaccatctcttgacaccagtagtgacattgatcaagtacactgtcccagactttcccccccgttcctctgaacacaaagcctctcctgattgttcatgtcactatttatgaatgaatgtcagagagcagagataaaaggatgataaaggtacaatggcctcgttaagttaatgtaagccctgattgaaatcatcacagataccattctgtggaccaaaggagagtactgtcttctctttatattatattattattattattttaacctgtagaaatgttgccagaacttgatattgagacaacttcaaagttgtcattggaacagaaaaaacaagagcagatcaaggggaatttgaagctccagcccattggtgattcagccatcgggtgtgggcctagggatgttgtttgccttccttatctggaaattttagggcaaagtttccaatacatagtgaaacattttttgttattgttgttttctttttttagtttcccatctcgatttattgcaaaaagtcttgtctatataagttgttgtatgcagtgatctctctgattagtgatctaattactttgtactttgttacttgaatttagcatgatattcataaagtaatagttcacctgcattttaaaattgttattaatatatacaaaaggatgtttacattacatgtaagtcatgaaaaaacacataaatgcccctatgctcatcctgtagttaaagaaagaaaacgtcactaatcctacctcccaggacccttacagatcccacttatcttcctccccacgcataggccatgactattgtaaagtttgtgattcattgtccttttgttttctttatactacatgtctacacagttctaagtaacatactgcttagttttatatgctttgagaatttctataagtggaattatacatcatgtactcttcttcaactacttttttttaccattcaacattatgttttaaagatttatctatgtcagtgtgagaaactctgggccagggattagcaaactaaagcccatgagccaaatctagcaagaaacctgtatttattttatttgattattcgtatggacagatagttaaggatatttttttctcttcacatttaaatggttatattttttaaagttatataaatataatagttatacaagtacctacataatattctcagccccaaatattcactccctagtcctttcagaaaaagcttgctggcccatgctccaggttattaattttattgtgagatttttattttttgaatatgctataattgtgaaatatccaggctacagttggagctccatttggattatttctagttgtttgttttttattacaaacagtatactataaataatcttggctgagtccatttgtaaacaaatttcgtcacaatacatttcagattgtaaattatgtacatcttcaatttttgccagacaatgtcatatcttttcccaaaagagttgtgtcaatttatggccccaccattagtgccagagttaagaataaaaggagccatttgtttgttttctctacttctctccccaaactttgccttagatagctccttgtttggttgcagtttatagaaaccaagaggaataaaattaccgacgactgtgtcctaagcacatacatgtatcttaaaaataaatttcccaataagctatcaaagttcttaataggtgctgtttattaagctataataatcttccattaatttatcttaaggtaatttttttcaaaattgtaaaaatcattgaactgcatatgtatgctccatatttacatatatttatgacattcaaatgttcataacacttttgttagtgcatttttttgaatttcaacgatgttttctaattatttaacaatatatctaacattccaagttacataatgaagtttcaatagagatagaagtaataatagcagtctgtgctagatgaaatatgatttttgatttttgcgtgtctcatagcattcaaggagacaaggaagtctgacaaccaggttacaagctcgaaaggccattttgttctctgagttgatttccaagaccatattctcactctcagagaaattgtacttcatcatgaaaatatgagccaatccatcttggggaatggtgcttatgtagatgactctatttagaaatactattataaagctaacacgggaagtacaattttcctccccaaccagcatgtctttggaattattttccttgcagatcaatggaacagagaatagaattggcttttctttgttggcattcatacttcacgtaccccccaagtgctttgtgtaatgaaaaacagcaatgttggtgcctttaataaaacattgagaataatgctttctttttccctggcattactgcagaaatggaactgatttggagtcaaatagaatgagaaaagatgcattcctttagtttaatatatctgaaaaggatacataattatagatttatcaaagttttgaatcagtaaactcctgttttccagagtggtcagagtgtaaaacatccgtgtttattttcagttatgagtctgtcttcacctcataatctataattgaggacaggaactatattgccttcacttgtttattactggtatgtagctgcctaataattaacagaatatacaaatggataattaccatagattacataagtgctcccctatattccgtgagataaggatatcaaaaatgagtacatttttgttgatttccttaaatgtgctagatggcaatgataaatgtttataggggtcatgtccagtatttatacccaatagcaaatatgatgttattagtcattaataataagggtgttagcatttgaaaatattttagtgtcaaaatattttagtgtcttctagccattgctctgaaagttattgctattactatttttttaatgttggcactggctttgtaattttataatttaattcaaggagaagataactgcatatctactgtgtcctatcattctacaaccatgactttgagaatagaaaataaggtacagcctctaaatgtaagagtcttgcagcagcatgggaaagaagggtaaatcttaactacttcaaacaaccgaaggaagatgctaaatgcaatttatttgtgcactagaagtgatataggcaacagtggtaagaggtgagtcaggaaaggacagagctgtaggcatctgtgttttctggggtgggcacaatggaagatctggcaaggagatgaacatgaagggactggagagactgcaaagtgtgggaggtttagtagcatccatcctgacctgtccagtctcatacctggagtcattcatgaaagcagtcattggctctctcccactcagataaattcattggaggaatttttattttcatatttctgtacttgtcttatacctggagtcattcatgaaagcagtcattggctctctcccactcagataaattcattggaggaatttttattttcatatttctagtccctgaaaagtattgttctggtgtctttaaaatagttttacagaataaatccaaaatatagtcaacaccatcatgttgctgctgagtatttggatggcttttgtctgttcgtcaaccctctatgctagagagcaagccgactgcaattcgactagttctttgatgataattgactgttttgaaaatattgttgcctaacaaagagtactgtactctaatttagattccactgctaattaactcactacctataggcaaaacatttggccatttggaatctggtgctccatgttcctcatcatggagaccccatgtgttccttatctaatttctccaatagtaatatgtcattatgaaagtaatgtgcctgacgaagggagaaccagttgttgatactttctggttaattagctcatgaaaaatgatttagtcccctgcaagctgcttgctttctcctagttgcccacttttccatgagccaaagctctcatggtgaaagaaggattgaaggaattaacctggcctctgaacattaacacttgtgtcaattttttttatgttaatctaccactgatatgctatttctaaaaccattgttagtagaatttctttagtgctaccagcatccagcaacagagaacactgccttctccctacatttcccttccctgtcctacccttctcttttttccctcccttcttctccttgcaagccaaagaacctcaaatcaatgttcttatgaaattgcaggcagagcctcctagaggttgtctactactctaggtaaatggacctggttattctttgagctctgattcacacatgctgtatcattgtagttaatctacttaacctccctagtccttagtttcatcaattgtaaagatgggaatatttgcattgcagaattatctgaaagattaactgatatcttatgtataaaacacctaattcattggaactatttggaggattaactgttattttatgtataaaacacctaattcattgcatagtactatattaattgctcaaaacatttaactcattagcccaaatacttccagggcagaaatggggtgaagttcttttgttaggagcccctgtgtgtcagggactccacatgcaatatcatcatcattttcataatgaccccaaggtaacggaactattatccttcattaataacatagagcttggagaacttaagcaacttctctgattttcctagctgtgcgaagtcacttaacttcacagtactgggatttaaacccacttctatctggctctgaattgcctgctgtcacaaagcataccatgttcccttcatgacgaggaacatggagccccagattccaaatggtcaaatgttttgcctatagatagtgagttaattagcagtggaatctaaattagaatacagcactctttgtcaggcaacaatattttcaaaacagtcaattatcatcaaagaactcgttgaattgcagtcagtttgctctctatcgtagagggctggcaaacggacaaaagccatctaaatactgagcagcaacatgatggtgttgactatattttggatttattctgtaaaactatttgaaagacaccagaacaatacttttcagggactagaaatatgaaaataaaaattcctccagtgaatttatctgagtgggagagccaatctttcactaaggcaatatgtttctttgggaaatattcagctatggaagagaagctctctttcctaaatttgaggataatccattcctcataaatggtaatttactgaatgatgatggaattaagccttcaggtgtctctgctgagctatggaatttctgctttgagatctatattcagcaagaatagtcaactcttggctcctcctcctgttcacctagcctcctcatttccatagttaagatactgaacagatccaataccaaaaacaaaaatccctcatgttgaaatttttatttattattttaattttttttagacaaagtgtcattctgttgcccaggttctatagtgcaatggcacgatcatggcttactgctgctttgacctcctgggctcaattgatcctcccctctcagtcccccaagtagctgggattataggagtacaccaccacacctggacagtttttgtatttttttgtagagtgaggtttcaccatgttgcccagtctggtcccgaacgcctgggctcaatccgtctgcccgcctcagcctcccagagtgctgagattacaggggtaagccaccatgcctggacctcatgttgtcactttataaccacacccatcttcctcctgtctcaccccttaaatcttagcaactagtaatctgccctccaattattaaatttaatcattttaaaatgttatgtaaatgtaaatgattcaggggccataaagtcacaaatgttaaggaacatggtcagagggtcactagatatctgagcttttaggcaagacctgggagatctggagcagccaaagacctgggcagcacagaaagctgggactgagggaagcattcgtgacagcaggtatggtgttccagagagtctggcagctctcaggcatgaaatgtgtaatcagattatagttatcctgtccaggaaatacttaatgatggtctacaggaagtgtcatgtagctaaataatgggataacccattcttaggttgctgaaaaaaatgtaatacattagtatgaatgagttaatcattcctctattctctgaacaaagagaaagcaataactggaggaaataaattgctctgacaagagtactggctatggaagcatgcaaataggtgaaggtcggccctgggttaacaattactctggcattttacagtgtgggatggaagggcaaaagttccatagagaccaattgataaaaattgcagccaaagggaattctgaggcaatggcagtagcaggatgtgagaaaaaggagcatataataatctattctggagaagagccatcaaccagtcccagtgacatggagaggtgtcaggtgtggaccatgaagtaggctttcagaagacaatagaacagatccgaccacatgagaacagaaaacattttctaatcccagattcttaggagaaaaaaatagaaattgacatcagataactctgaacaatatttacaattgcacacacttaggcttttagccatttacagctaaacatatttatgtctcatttcagagtgggtgcccgttcattctaaacatctttttattttttttgcttttgcctccattaagtcaaaagctaatgatccactgcacatgttgttcattgatttaacaacttccttagagacggggaccttttcctatttgttttccattctatgctcagagcccaggaaaatttatgaattcagcaaatacttgctgaacacttactatatgccaggtactgtgacatcgacattgaatgaaagaaatccaatcctttctttcattggaacttacgatctagtagggatatttctttattcaaataaccagtatttagtaaacacctattgtgaactgaactgtgttctaggccaattaaatgtttaacaaataattaaacataaaccctttagtgaaaattatcctgagtgacatactgatatttatgatctgagtttttattttattttcattcaaacaaaatttctatggttctaaaatacatatacaaagaaactctatcagttttccttctacacagaaattttttcccatgtggttagcaaattttgatagttcttataacccctatttagggtaattgttgaccatgctttggggataagacttgacttttacttaagcctttagggcaaaagatacagctttttgtaaagctagttttaaatttcgctaggttcaagacactgaggataagttgaataacaaaaaatcaacggaaaaatactcagcagttgacactgactcaatcattgtttggagaaaaattaaacctatactatatggatcataacatgctccaatacatgaaaaatatgctttaaaatacagctggggagagatgtttgtttttattaaaagctgctcaaaggcatcatcatagctacagaatctttaaacatctacaaacacaaaggcgtaaaaaatagctcttcattgattttttttacctgctgtattttatgtattctgaaagttattggtactcttttaaacaagggttgactcatatctgccagattttgtgaatgatcactttctgctgattcaatctgggaaaatcacttttgctgagacagtccctaatggctacatttatagtcttcttacttgttttattactcaaggagaactcctatttttccagtcaaagcacagaggatctaaacaacaaaaatagctacaggtaggttttccccccagtcagtcctccacaagacaatatagatttttagatcaaagagttcaaagagattttctggttcacatcaccagaatcagatcatacagatgcattatcagtaggtcatggcttcatgcagaccctgattccattttcagttctgatttttgcttgtgttcatcatgattccttcccgaactcaccagtacagaactcagaccttctctatgtttagctctacctgagtgatgggctgaaatgatctcagtgggactctgggcagactttcttgaattttatctaagacagattctggtgtattgagggagtactcaggagaagcttataaggatgtgaaggaagcaggagagagcagagaaaaaagctaaataaaaatgtggctccaggtacagcttagccttagcctgatcccatagggaactctggagcataatggtaccacatagttgtcccagcttgagaaaagggggctgggtttgtgcacccctgagtcagctaccagccgtgagtgacctgacagggatttccaggacaggtgcagagaaagtctcctgggaagagtgtagccatgagctatgagcaccccacaggcctggaaattggaagttgatgcaccattctgatgcaggacaggcaacccctgggcttagcccaggaaagttcttagcttcacccaggaaagaatgcaagggtgagcaggtggtgttagacagcaacttttattgatgcagcagtgcacagaagcagcagaggtactactctttgaggagcagggttaccccataggtagcgtgcccagaatagcagctcaggggcagatctgtacttgctatttatacctgcttttaattatatgcaaattaggagtggtttatgcagaaatttctaggatgagggtggtaacttttaggttgtggggtcgttgccatggaaaggggcggtaacatccaggtgttgccatggtgatggtaagccgacatggcacactggtgagcaccgcttatggaaagctgctttcagtaaggttctgcccaggacctgtttttgctggtctctggagtcaagtccctcctactatctcaattatagcaaaatagatccaggcaggagatcaacagcatcttctacacaaccacagcatgttgactttgttgttgcttgtattttgttttttcttccatcagtctttctgggctgtgagaccagccatgtttccaaagcaattttcccttcagagtaaacaggtaacaatttgtaactgattctttttaattcactcctaaaatggctcagcttgcacttgaaacatcaagaagcttgaaacatcaagaagcttgaaacaaaaaggcataattactcaggttaaaaatataattgatgatttattgtctgcaaagttggttaccataccctgatacggcatcttgtgtttatcagttctgagcacctttaaacagcagagcagaatttcccattaaggaaaaaaaatgttgttttacatttccatgcttcagttgaactccccaaagccagcctttaggggaaatgcatgcatacaattgagggtgatgcttagacccaaactttcaattcagctgtgaaagtctgatttaagagtgtctcacatggcatctaaattagaaagtcactcaacctctcagtcttcttgaaataagtgggggagccactctttacaaactgtaaagccttggagaataggattataaaacaacagaaacaataacaatagttactcatgaattaatgcttccgtatgattcaggcacacttctaacaagttgctgtaactcattgaatactttttaaaaaccctgtgaagcacacatgcttattttttttaacagaagaagaaactgaagcacaaggagttcctattaagtgcacattgctgaagatgcagcggacacggtctctactctcgtggagctaattatgaaattaagataaaattccaactgcaatcatcacagcaatgaagacttacaacaattatgagattccacaacagtagtatgtgattaagttgtatcggtctcaggagactggtttgagataaagaggagagaaaaaataatatcctgggcagaaggaatcacagatgcaaagaacctgtggccaaagacatcatgtggctggctggcaagaggaagggccagcctggagaaagaagcttctggaaggtagacaggagccagaacaagcaggactttgtagcctgtattaagaagatttgtgttatcattataagcaatgcaaacccactgaagcaaaacccagataaacattgacttaaatgcaattaaaggcaggagtgtagtatttgcctaattataataagccttggttttcaaaagagccctttgttttgaggatcacaagtagattgaaagaaggacagaatgaaatgaagaattatgagatattgcaggagaccaagctgaatgctgatttgtgactttgattaggatattgctggagatagacgtctatctagaaatatttttttcaaaaaagatagataggaattggtgatgaattggatgtggttgggggtactagaagggagttgccaaaaagggatgctaaggttattcctaggtttctgatttgtacaaccggaaaaataatcataactttcactgagaagagagacattgaataaggagcaagggtaggatcatgagttttgctccaggtgttgaatttgaggtgcttttgaaagacaaacaagagaagacaagcagacagtggaataataagtctaaagagagctctcaactagacatggtcatcgaagccataattgtgaatgatgtttacctatgcatacatagaggaagggaagacatagaaaccagccttcagtatgccggtatttaatgacttagtatataaacctcagtagataatagttgtagaaggaagaatttcattaataagtcaaataaatattgatattcttagattgtaattggagcaggatcagcatttggcaaaatcatcaaatatttatataaacaaatgtaaactaaaaataaaaaaatttgaaaataattgtttcaaatattgtataaaggtagtttccctttatacaacttcttgctttgaaaaggagctaacgggagagagcagaagaatttatttcattcccaaagcaaaggcaatatttttagtagaaaacaaaattgttcgccttcttttttactctcctttaaaatatccttttcccacactattgctgaaacacaaatttctcacccagcaccaccaccaggaggtcaaccacatcctgtctaatgatgatcagtctctgaccagtcatttttccaaaagtcccaagagacctctgaaaaacataattgaaaactctaaataaagtgtaactgttaggttacctattagagccaaagaacccaagagtgagcttactaaattctctttgactgacagcaggcaaggacctgaatgaacatgtcatttgaaatacacaatagcctgaggctgcaaaggagaaaaaaatccaaaaccaaaaaacacaagagcatctctagctcagcttggtaattgggattaatctgtcaccagaaagctttttcaggtataagctaccagctgtccttgagcaaccaggcctgtgtcttacccaaacttgcccgtgacgtatcctaccctgtctcctatcaatggagacagaccagcttcttttctcttgttcactttgctcattgcaaatagatagggtaggaaagctgcaattcactgaaaatcatactcagcagataaaatccattgcacatttgctttctttcagataagctcaagaatatagtgctttttaaaatattttattttttaaaaataaacatggctaaaaacctgaaactcttttttcaacagaagctgaaacttaaaaatggaaaccttaggtcattggaggagaaagagtcttgcttatttgtccagttcagccacattctgccttgcagagtggtttctaaggtgtgttatagagtgtattcaccccatgccaattacttgttaaccttttttattaaccattctctctgctcattaggaggttaattggtatggaaatcatcaatgttccctgctttctggcttacagttgaagtcagctaatgggaagtgtctagcagatcagaaatgcacagggcatttattccattttcctgctttctgggtttctgtgggctgatgcattcctctgtcacttatcagagctcctgtcgggctcttcttctcacatggtcctctctctctcaggggttgggaatcttcctccaattgccccatcaagtctatagtgaaatggagagcctctgctgctagcctcagtgtgcttcactacccattgcccttcctttgtggttttcctacactttacccacatctttgtatgtagcccctttataaaattgcattagttttctgtggatccctgacccacctgggataacacataccacaaccgtatcaccaaggtactccaaatcaaaaatgtaagccagaagctgtagagacaaaataaaatgcaatagaaggatttggatgtacaacagttaactcaagtttagtcactgctaaaatatcttcccaggaaacaatgacctttcttctagatacattggcccccagtatgtttggctgtgtttccagcaggtgtgtctatattgtgaccttccccggtctgcttctcccacattcaaacttagctaatttgaccatgaacggtcacatgatctgatcagtgtcacttgagtccttttcctgagaacttggagtgtggactgcaaaaggtcagacattgagctggggttaagtagagagcacaaatcactaaaaaaagaaagaatgatgtaacagagcagaaatcagagacagaaacacaagagagtagttccaggttgcaagctccttctgagacttagctctatctctttcttgaacagagttattactttatatttaaagtaaaactctccatttttatttattagaggaagttggtttctgttacctgcaactaaaagagtcctaaatgatccattagacaaaaaatgaggctttttatccagcaataaagcagtacctatgactctattttagcattgtccaagagaatattctatggtgatagaaatggactgtaaatctgccctgtccactgtccagactgtgtgcagtggctcatgcctataatcccagcactttgggaggatgaggcaggaggacggcttgaggccaggagaagtttgagatcagccagggcaatataacaagaccccatttctattaagaaaaaaaaaaaaaacaaaaaaacagaacaagaaaacaaaggaaatctgcagtacccaatgcagtagccctggaaatatgtggatattaagcacttaatataggcagtgcagatgagaaactgattttcttaaattttaatttattttggtttaaatagctgcataaagctagcaatgattgtattgaacaactcaactctagattttgattttgttttttgtctgattccttgtgttttgtgtcttctctatgaattgcttttgcaccttctgcaaatatactgaaaaatcccctactcttagttaagctggaatatcactgtaaccaaacattaattattaggtatttatatctatcctgtgacttttaatgagaaactggccaacttgaaatctgtcccattatgataatatcactacatcactgtccagctcaactcctgttactctttaatcctcacgctttgatcttattatgccaaacttactgtagtttccatagtctgttgtgctctgttatgccctcatgcccttgcataagtgataccctcatacattcattatgtatttattctttcttttattcttccatccatacatctattcatgcaaccatacaacaaatgtttattagacaggacaaatttggtaccagaaagatatatataaggtgcatatttgtaagtgaaatagatttaccacttggtgatcagtaggtgtcttggaaggcaccttggagtaatcagaggacttagaaaacaagtagggtagattatttttcttttatcaaagtatggttcatgtgtatcttgcatagaattgcttgctaaaaatgcattatagtatagtggttggaaacataggtgatattttatcttccttagaatttttcttttaactaattcgtgtaaaacactgagaagaatgtctcttaatagtaaatgttcaataaatattgggccttatttacaacacttctttaaaatgttcctataccacacttctgaatctgtcatttaaacctgctcttcctatagtcttctccatttcagtaaatagcaactcaatctattgcagattgagtattttctgaggaacagcctctgagatagagattgttgtgcaggaagtttagtcagggagtgctttcaaaatcctccctgaaggagagaaggaagaggactgggcaaagagaaaagctgggctaagatgcatcctcagcaaagaccttagctgaccccacagaatctcacattgcagagaactctgactcttctgaatcatccttagttgaaatgggtgtgctgagctttatcccccaatgcccacatcaaccagtcattggttgacactgcaggccaaagggtataagcttgagcaagggagttattttcagctgaggtcaatttccctggagcattgagtgttaagggctgtttgctagaaacatatcttgaatttgaggaaaataagttgtttagtccaacagaaggatctgtgtagggtatcatagcgtttcatacactacctctcttcttcttcagactaaaaatcttggagccatccttggtttctctctatgtaattccagttctgcctttgaaatatatccagaatctgatttttttttttttttaccgtctccactactgccatccttgttaatctccctatctcctctaatttggattatttagttaactatcttattgatcattctgatcttcccttttccccacttgtagtctatgctcaacatgacagacagtgtgatcgtttcaaaaaagttgcctgttcacgtctcttctctgctccaaactcctccgtggatttcacatattacttagagtagaagtgaaatccttagagctttctaaagcattgtggttgggctgcccacagcatttctgacattatttctgaccatttaaattcttgctcactcaacttcagctttgttctgcctcaaataccccaggcactctcctgactagggactctaaattttaccctttgcacatccaagaaagcacattttccataatcccatgtgcctccctccctcattcttccagctctcagctcttgtgtcactttatcaacacggtctttacaaactacctcatataaaacagggaattccagttccctattattccttacaaccttgcatgctttatttcgctcctaaattttttgtatcatctctcctattatttgcctaattgttcttatatttgttttctggtggtagcctcacagtttaaaatgtaagcttcatgaagcagggccatttttttttgtttttttttttattattatactttaagtttgagggtacatgtgcacaacatgcaggtttgttacatatgtatacatgcgccatgttggtgggctgcacccattaactcatttacattaggtatatctcctaatgctatccctcccacctccccccaccccacgacaggccccagtgtgtgatgttccccatcctatgaccaagtgttctcattgttcaattcccacctatgagtgagaacatgtggtgtttggttttctgtccttgtgacagtttgctcagaatgatggtttccagcttcatccatgtccctaacaaaggacaggaactcatccttttttatggctgcatagtattccatggtgtatatgtgccacatttcttaatccagtctatcattgatggacatttgggttggttccaagtctttgctattgtgaatagtgccacaataaacatatgtgtgcatatgtctttatagcagcatgatttataatcttttgggtatatgcccagtgatgggatggctgggtcaaatggtatttgtagttctagatccttgaggaatggccacactgtcttccacaatggttgaactagtttacagtcccaccaacagtgtaaaagtattcctatttctccacatcctccccagcacctgttgtttcctgactttttaatgatcaccattctaagtggtgtgagatggtatctcattgtggttttgatctgcatttctcttatggccactgatgatgagcattttttcatgtgtctgttggttgcctaaatgtattcttttgagaagtgtctgttcatatcctttgcccactttttgatggtgttgtttgattttttcttgtaaatttgtttaagttctttgtagattctggatattagccctttgtcagatgagtaggttgcaaaaaattttctcccattctgtaggttgcctgtcactctgatggtagtttcttttgctgtgcagaagctcttcagtttaattagatcccatttgtcagttttggcttttgttgccatggcttttggtgttttagacatgaagtccttgcccatgcctatgtcctgaatggtattgcctaggttttcttctatggtttctatggttttgggtctaacatttaaggctttaatccatcttgaattaatttttgtgtaaggtgtaaggaagggatctagtttcagctttctacatatggctagccagttttcccagcaccatttatttaatagggaatcctttccccatttcttgtttttctcaggtttgtcaaagatcagatggttgtagatgtgtggtattatttctgagggctctgttctgttccattgatcaatatctctgttttggtaccagtaccatgctgttttggtaactgtagccttgcagtatagtttgaagtcagggagcatgatgcttctagctttgttgttttggtttaggattatcttggcaatgtgggctctttcttggttccacatgaactttaaagtagttttttccaattctgtgaagaaagtcattggtagcttgatggggatggcattgaatctataaattaccctggacagtatggccattttcacgatattgattcttcctacccatgagcatggaatgttcttcttatttgtttgtgtcctcttttatttcgttgagcagtggtttatagttctccttgaagaggtccttcacatcccttgtaagttggattcctaggtattttattctctttgaagcaattgtgaatgggagttcactcaagatttggctctctgtttgtctgttattggtgtataggaatgcttgtgatttttgcacattgattttgtatgctgagagtttgctgaagttgcttatcagcttaaggagattttgggctgagacgatggggttttccaaatatacaatcatgtcatctgcaaacagggacaatttgacttcctcttttcctaattgaataccctttatttccttctcctgcctaattgccctggccagaacttccaacactatgttaaataggagtggtgagagagggcatccctgtcttgtgccagttttcaaagggaatgcttccagtttttgcccattcagtatgatattggctgtgggtttttcatacatagctcttaatattttgagatacgtctcatcaatacctagtttattgagagtttttagcatgaagggctgttgaattttgtcaaaggtcttttctccatctattcagataatcatgtggtttttgcctttggttctgtttatgtggtagattacatttattgatttgcctatgtcaaaccagccttgcatcccagggatgaagccaacttgattgtggtggataagccttttgatgtgctgctggatatggtttgccagtattttattgaggattttttgcatcgatgttcatcagggatattggtctaaaattatctttttttgttgagtctctgccaggctgtggtatcaggatgaggctggcctcataaaatgagttagggagtattccctctttttctattgattggaataatttcagaaggaatggtaccagctcctctttgcacctctggtagaattcggctatgaatccgtctggtcctggactttttttggttggtaggctcttattgccttaatttcagagcctgttattggtctattcagggattcaacttcttcctggtttagtcttgggagggtgtatgtgtccaggaatttattcatttcttctagattttctagtttatttgcgtagaggtgtttatagtattctctgatggtagtttgtatttctgtgggatcggtggtgatatcccctttatcattttttattgcatctatttgattcttctctctttccttctttattagtcttgctggtggtctagcaattatgttgatcttttcaaaaaactagctcctggattcattgattttttccaggtttttttgtttctctatctccctcagttctgctctcatcttagttatttcttgccttctgccagcttttgaatgtgattgctcttgcttctctagttcttttaatagtgatgttagagtgtcagttttagatctttcctgctttctcttgtgggcatttagtgctataaatttccctctacacactgctttaaatgtgtcccagagattttggtatgttgtgtctttgttctcattggtttcaaataacatctttatttctgccttcatttcgttatgtacccagtagtcattcaggagcaggtagttcagtttccatgtagttgagcagttttgagtgagtttcttaatcctgagttttaatttgattgcactgtggtctgagagacagtttgttataatttctgttcttttacatttgctgaggagtgctttacttccaactgttggtcaattttggaataagtgcaatggggtgctgaaaagaatgtatagtctgttgatttggggtggagagttgtgtagatgtctattaggtccgcttggtgcagaactgaattcaattcctggatatccttgttagcttgctgtctcgatctgtctaatgttgacagtggggtattaaagtctcccattattattgtgtgggagtctaagtgtctttgtaggtgtctaaggacttgctttatgaatctgggtgctcctgtattgggtgcatatatattcaggatagttagctcttcttgttgaattgatccctttaccattatgtaatggccttctttgtctcttttgatctttgttggtttaaagtctgttttatcagagactaggattgcaaccccaaagcagagccatttgaatactgttctggatcctgtactcacaaaaaacaacaacaaatgaagcaggcccatttgttgttgtttttgtgagtacaggatccagaacagtatttctgacgtacagcaggtgctcaatcaatacttcctggctgagtaagttgcttttgtattttgattaactttaaagtgagatatagagacctagtccagaccctgtgattcctatgaattaaaaaaaaaataagacatgatatgcatgttggtcgaggcaggtataattttacaaatttctcacgatttctatctctggttactcaatcaaacactaacttagatacctctgtgaatgggattgtgcagatggaattaaggttataaaccttaagacagggatagtttcctggattatccaggtgggttcaatgtaatcttgagtccttagaagcagagaactttctcaggatacaatcagaaagagatgtggggaaagaagagagtagaagaaataaggtaacaaggtcagtgagagcaatgcagagtgtgagcaggactgtatccaacattttgggcattgaagatggaaggagttggttatgagcccagcgatgtgggtaatccctagaagctaagaatggccctgactgcagccagtaaggaaaagagtgcttcactggtacaatgcattgaagtgaactctgccaacaacctgagtaagcatggggcaagattcttccctagagcctccagactccttgatttcagcctgtggcaccctccaccctcagcagagtacccagccaagcctgctggacatccgacctataaaatttggagatcaaaaatgagtgttttaaactgtggattttggaattatatatatatatatacacacacacacacacacacacgcatatatacatatatacacacacacacacacacgagtagtccccttcctattaagatatatacatatatatttaaattatatcctctgttctcagataaacaccatgacagtaagcaatctgcatgtaaagaaacaggacaataaaatttataatattctagacagataagcttctagcttctccagattctactttttattcaataactaaagaccagtaataagaataattgaagtgaactgttttaccaatataattatgagtctgtactgctgatccactgagtatatattttacttgtcagagcctaagtaggggttacattttactcaacaatgatcttggggagtttccttgtgctttttgctgagcttgtatgagtgttgctctgcaggttattaatgtcccagaataacctaataaggagaacagtgcctacaactacaaattcaaactaaaattcaactacaaatcctaccatttttcattaaaaataaaaacactctcccaaactaaccattgaatcatgattgtcccagcagttaagaccaattgcaatgactggattatttgcataattttaagcaaatcactcacctacctctcttttagttttccccttcaacctccaggaattgctctaaagatgtgatttttgatgcaaaagctttttacaaatgttagaaggattaagccggtatttgataatgattataatttgtaatattcttgtttagttgagtttctactccttcttgtttaactgtttctgagatttaattatctgctgggcaattccttatttccttaaatttcctttgctataaacttcctctttgtggccatcctgaaactcttccagttttctctcccattgccccataatccccttcttctctagttttccatcacttttttttttttttagaactctttcccatgaacactcttttattagaattgtcctgcctgaaatgcagtgctacaacttacatggagaggaagatggcaatatctaggaagacaaggatggatttattcttctacttgacaatcacttctatgactctaagccaaaagtaataactaaaatacaaaaagtggtttgaacaaagcaatttaatgcagcatttttttaataactaatgaattgatatagtctaaatgcctattaacagggtacttgttaaataacttgtggtatatccacaaaatggagtaatagaaaaaagaatgagaaagatgtctctcttaggctacctaggataaccgtagtcaataatgaaaaattttctttggatagtgcattggctaatgaataagtaaagaatgacggatttagaatatcgtcatatggcaacacctaatgaattaacagatttagacaagaatcatctagtggcaaccagttatgttcctccccaatgtgaattattttgtgtcctcccctcggtcactacccccacaattgaatttgaatctaatcaagactttagatctaaataccaattttcagaaaatctttaggacatttggacttgtaaaaaaacaccacagggttataatcagcaaaattcagattgcgagaagctctattggatagtgcaccagtttattcaataaattatttgaaacaggagaaagagaaaaagagagagagggaggacatagctgattagttctggttccactaggagggagtagtccctttccttttcagatctccccttcacaactaaaatatcccaaacataacgtaacagacagtacaggaattctctagaaaatggaaagatgaaggtggtgggctatatggggacagcagaaattgaagaatgacacagaggtgagttctctgggtttccttattgtctcccaagtgcacagccaggacactacaaaagtctccaacctggaaacaccaatggtcaaaaatgtaaaacagaaagctctaagaactctcctcctagccagaggactgaaaaggggtggcctaataatagaaaaaactttttgacaaatgctcccctaccaaaactgaacaccaatgggaaaactgcttctccatcctcaccaccatggttttaggctggctgtgcaggaagttaatgtttaatccccagcctcctgccccagagaagcaggttgcaagctccaataccaccccctgccccccctcctcccaccaccacacccccttgttgtgttggagggttgagtcaagatcttgattttctatccctagcctagaggaaccaggcagtatgatctgatccagtttttctgctggggtagtgtcagtgggattcaactgctttgagagaggtagggtgaaggccaggttgagggagtaggaggtggtacaatgatcataacagtgcagaatcttctagactgagtggggagctggtcttccctggagaaagagcagaaataataacaggaaaagaatagtaactccaaaaaggataaatggacgtcacaatgggtagaaacacaagtaggtatcatagacttatttctcagtatcctgcttctcttgagtttcttaaatcatatttgacgattgaagaaaagtgtcatctattatgtggaactcaatgtatacaaaagaaacagttaagataattatattaaaaagctaaaaggataaggagaccaaatgaaaattatgttgctacatttcacttgaagcggtaaaacttcaatatcagtagacaatgatgttacatgtatgtgtgtatatacaaaaaaaattgataaacctctattaaaactgacaaaaataaaaagctaaaagacatacatcaccaataccagaaatgaaagagatggtatcatttcagatcttacaaccattgaaaatatagtcaagaaatacaatatgacaataaagagattttacaattttgataaaatggaccagttcctcaaaaagcatcaagtattacaactcatctaatatgacatagataatgtaattgtcctataattattagggaaatttaatttgtaattgaaaaactgaagtgaaaaaaatatttggggtactgtagtttccctggacaattctacttaacattttaaatagaattagcataaattctacacaatttttttttcagaaaatagaaaaggcagagacatttcccaacttattttatgaggctagccttcttgctgtccccttctatggccacaggaccattcttatgtgtacatgcagagacagaagaaagagagagagagctagacagagagagagggagggagaggctttccgacatctcttcttatgttggcactaatgcattccagtttgggcttcatccttatgaccttattcaaccctaattccttagaggcactatctccaaatacagtcactctaggggataaggcttcaacctacttttgggttaggaacagaaacattcaaactgtaacagcaacatacaaagattatacaaaaaccagaaaatttaacactaaaaactagaaaatgggcaaaagacatgaacaaacattttttgtatgaataagcacatgaaaagatgcttaacatcgttaacctttagagaaatacacattaaatccacaggagatagcactgaaacctacaattagaatgtttaaaataacattaaactgaacaaaaacaactcacccatgagctgggtttccctcttttagaagtatggaccaagaggtccggagcctacgtctcaagagggattgctttttggactggtaagtctacgtggcgccatgctggaatctccatttggatgtcatttgtgtctatggtcgagtgaaagatgtgcctatggagagaagtgaaaacacaagcgaatgtgttccctgttggttagaaagtagggtggtgtgagagtgctggtgccttggcccttggcacctttctaaattccaattccaatatctgataaatcctggaagtacttgctgtctgttagtgtcaagtggcgttaacataaatctcccttcagttagtatgagtgggtttatatcttaactagtgaccccctgacttgagcagtccattcaacaccctcttggctccccctcttcttccttccctgctcctactttctcattctggattcttctctttaacatcctgaggagaacatcagaatacttgggatcattaacataggtgcatataaataacattcattcagcgcaggtgaacttaccttgagtacagcttgaaagttttcatgaacagtaaaaaaagctaactatttcctaatggaaataaataccaaatccagaggaaagtaaagtattactcatgaaatcactttataggagtaaatgtaaagtgtctaatgaaattcataatataccatattcagtgcctgtgtctattgcatatactaattttgattgtattgaataataaaaagtttaaaataatatcatgtagcaagtaaaatagaaaatgaaaaactttttgttgatctaatgtttatgcccaaaaaactaagcctatatccctgcctattacattctcgacttagccaataaattaacactatttttttgtttatctataactagacctagatgatttacatggggaaaaaagctgacaatccaattggttggtgttacatgttgcagatgactaggtttgatctcaatttcttacttttcattttggcttttactgaaataaaaaatttctgaatatttcatatagtaaaatataagaactggaggtttaaactcttcataacaataaaatcactttttaaaaagttattttttctttcaggttatactgtaattatgatgaaatttggaattttctattttcatataaacaaaaatttcaatgtatacagttagttaatataaggaattaaatgcaatagctttgtacgagtgcatttggcagggtttttttctgacttttattatagtggagatagtccaagaaactgtaaaagtaacaactggatttcttctcttaatatgttgctaagatacaaatgaaagtgcatgtaatacaaaactgtctgcccctaagatactttgatatgtgagaaaagagtcttcacaataactccagtaaattaatacatgtgcagacttcaggacattatgttatagcttagtttaatttcatttcaaaaaaccaccaggggccagacgtggtggctcacacttgtaatcccagcactttgggaggccaaggccagcagatcacctgaggtcaggagtttgagaccagcctggtcaacatggtgaaaccctgtctctactaaaaatacaaaaattagtggggtatggtggtggacacttgtagtcccagttactcgagacatggaggttgcaatgagccgagactgcaccacttcactccagcttgggcaacggagagagaccctgtctcaaacaaataaaataaataaaataaaatgaagactattaggggtagtatatgtaacggatctttgcgattttttatgaatataatataaattaataaatgagcaaaagtctaagcttaaagtctaagctttaaatggtatatggacagttaagtaaaagcaaaagaaatctaagtttattttggtttgttctgttgatcttttatataatgtgaatgtgagagatttctagagttccaacaagcattaaattcagtgtgtgtgtggggtacttttatcatacactgatgctgcaagcttaaaaataaagcaaatttatgcattagcctttgaaaatgaaaacctacattcaaattttctgtacaaatttaactttagtatattttaaagaaaataatgttagtaaaagccacttcctggctaggaaggaagatgttgatgtaattacaatattactaaagcacccaaagatatgtaataccagagaaagaagattatagaaatagaaaatggggattgaatagaccagcttttcagaatcctcttgggagaaagtgaattcacactcttgttatttcctgattatttagagatgaacatcccattcccatgggtcagacctagggtgcaaaaggttgcttgtaaattgctttgggtgaaactccatttaccagtcttttcatacagcaaaatcagattgatactgaattaaaaggcagttctggggaggaaaagagggcacaaaacagaacagccaattgtctcagaagaaatgaggtagaatacaaaagcacatgctaagttaatgatggacaggactggcagagaggggagtgggcttgtgttggtccatttgtgctgccataacaaaataccagagactgggaaattttaagagagtgggaaaataccagaggctgggaagtccaaggtcaaggcatcagcagctggtgtctggtgaaggtttttatgctgcttctagtagaatgtgaaagggtgagcccggtgaaccaacactgtgggaagcctcttttataagagctttaatcccattcatgatcaggagccttcatagcctaatcacctcttaaaggcccgagcttttaaagctgtcacattggcaacatgtgagttttagaagggacacatccaaaccatagcagagctatattctctctaaaggcaatgtgtgtaagccactaatccattttatagctatcacaaagatagatgcattctttacaattctttacaaagtcttcaccaatataatcaatgcatttatataaacaatttgtagacaagataattgctgtattttataaaagacacacttatttattcaacacatatgtattaattctccgttctaggcagtgtggatatagcaatgaagacaaaaattggtgtccttttgtagctgatagggggagaaaggcaataaataaaacagagaagtgaaatatataacatgttacaaaatagcaagtgcagaggagaaaaataaatcaggatatgtggattgggaattttagggtgaaaagtggtgcaaattttaagagttctcaaggcagagttcaatgagaaagtgacctttgggtgaagacctggagacgaaggggcaatgtgggtattatgcatgggctgggtgaacaggataaaaagtagtaggagatggggtcatttagcattccacgggcctttcttagggcttgggtttttttcctgagtgataagggaagacattgggaggtctgggcttaggactgacatgatgagacttaaatagggactctgactgctgtattaagaacagagtgggccgggcacggtggctcaggcctgtaatcccagcactttgggaggccgaggtgggcagatcacgaggtcatgagatcgagaccatcctggctaacacgatgaaaccccgtctctactaaaaatacaaaaaattagctgggcgtggtggcgggcgcctgtagtcccagctactcaggaggctgaggcaggagaatggtgtgaacccgggaggcggagcctgcagtgagctgagatcgtgccactgcattccagcctgggcgacagagggagattccatctaaaaaaaaaaaaaaaaaagaatagacctagagtggtggaggtggacagtagtgaagcagggagaccagttctaccattttcgagcaagttagtaaaacttcctatgcctcagtttcctcatctacaaaatgggactaacggtacatatttcatggtattgtggtgagaatcaaatgaattgttatatgtaaaatatgtagaatattacctgacacatatcacactgtccacctatttgttattattattattattattagagacggagtctcagtctgttgcccaggctggagtacaatggcgtaatctcagctcactgcaacctccgcctccccaggttcaagtgattctccctgcctctgcctcccaagtacctgggattatagacatctgctaccatgcccagctaactttttgtatttttagtagagacggggattcgccatgtgggccaggctggtctcgaactcctgactttaggcgatcctcccatcttggcctctcaaagtgctgggattacaggtgtgagccactgcgcccagcctatttgttattattattatcactattgtaataatacagacaagaaatgatgacagtttggactagattggtaaaaagtggtgagataacatttgaagataaagcaaacaagatttgctgaccaactcgatgtgagcttggaagtaaaactagggcatcaaagttgggccccagtagttaggaacatggagttactatttatcaagttgaggaggacatgttaggaaagcaggtttgggaggcaggaggccaaaaccaaaaatcagtttgtatataatgtttgagacatcttttacttgtccaaatggaaagcttgagtaactggacacatgttggcccacacagctgcttccacacagtgtgtgatacatgaaatggtaattcccatcatgttttcatacttagcattagttttatgtatatttccaccacggtgttccaatagctaacaccttctattaaaacattcagtttgattaaaaaatcacatttaatgcaaaaatggttgctcaatatagtataaaaatcatcacctccaaccaaggatacaatgaagagagctgatggcacttgcagctgctaccagaatccaagtagctctaggaattttgtgtgttattaacgtaatgacagcatttgcaattatctatagcatgcaattgtaagtacatatcaacagtcttaccagctggatatttgaacttactttccattacgagaaacatttccccattcctaaagtcattagaatggaagataattgtggcttatacgcacctcctcctgtgggcttaaattttagaattgttgatgttcttttcctggtgaatgaggaaagcatcttgttcttgtcgggctctttcctgtctctacctatagctagtagaaatagtataaataataatatagcagttaaaatttatgaaagtctcttatgttttacgtgccatgctatgcattttaaatgcattagcatttccatattcaagtaagaaaactgaggtacaaaagagtttcaaattttgcctatagtcacacttccaaaaactggtaaagctgagatgtgaaaccaaaccctttgactcaatcccacactctttgccccactgccccaacccatctgcacttccctctttagacctcaggatttcattcttagtgtgtactctgacttaaatcaggtttgcattttttttttttttgagatggagtctcactttgttgcccaggctggagtgcagtggcactgccatctcagctcactgcagtctccgcctctgggttctaagcgattctcctgcctcagcctcctgagtagctgggactacaggtgtgtgccaccgtgcccagctaatttttgtatttttggtagagatggaatttcaccatgttggacaggttggttttgaactcctgacctcaagtgatctgcccacctcggccttttgaagtgctgggattataggtgtgagccaccgcgcctgaccaggtttgcattctttacctctctctttcccctttctacttcccaattgtaattttcagaaggaaaggggagtacacagaaaagctgaagaaacttaaatcagtataattttctctatttcagagacccttttagatggttcacctctcactggttaaagaaaggatgcagggtattgtaggacaagcctaataaccagactgagatcagtgtattatctgtggattttagtttcctggtcctttcattcaataaagaatgttctttctagtggccagaagtaaaaggattgcataaagctctacaattccctctttaaaacaacttatttatttcatggactttgctatctattacctcttgcagaaaccaaacatctaaaagcaaggactggaaacaagaattggcaatgtgaaaggtgctaacagacctaatttatttgaaaagagactgacgacttcttttcttttggattaagttaatggtgtatttttttttttttatctggaaataggttctgttgctgatgtttggaggcagggcttcaggagattttaaatatcttcaggagagggaaaggctgtgttaatcagggtcacttgaaattacttactaaatgatttagcttagtttctttcagaaaagagaatcaaaagatttataattcctttagctaccctcactcattaatactcactctaccagagagcagcaagcattttgttcccccacagtgaagagcaatttctcatgttttgaatgtcagagtgaccactgggatttgaattaaattcatgttaaaaacaaattttgacattcgaagttaaccatctcagaaatacatatgagagtgactgattctgttagcttatatgccttactctgtatgtgtttgtgtatgtgtgtgtgtgtgtgtgtgtgtatgtgcgcgtgtgtatgaacagctagctgacagacaggtgtcatttttgattatagaattagaaaatcattttgcttacttttttaaatgaaatactgttattcttgcataaaatctttcaaatgcagatatgataaaaacatcacctttaaaaagacatagtgtttgaaaactttgattctcagtatccaaacctccaaacccgtttcattttctataactcttcattttgaggctttggtgggagggagaaccccatctcctatctgagaagcatgaagaaatcatgtatttcttatccctttcacagatagtaagtgtgggcctgtgaattaggctcaagcaattgaagactccctcttgggatgctgaattttgagcaatgaattcccttcacttctgtgagccagtcaatagtcagtcagtagacaccttatgcataggtaaccaagaaatgacttttgtaacttgaaactcagaaacctgcctgataaagcatttgtagatagttgctttacaattacttgtttgattaccaaaataatgcatgctaaatacagaagaagtatagcccaaaaggcaaattactttagttattacattccagactgcctagaaaccacctcttcttcttcttcttatcatttttttttttgagagggagtcctgctctgtctccagactgtagtgcagtggcgcgatcttggctcactgcaatctctgcctcctgggttcaagtgattctcctgcctcaacttctcgagtagctgggactacaggcatgcaccaccacacccagctaatttttgtatttttttttttttttttagtacagatggggtttcaccatgttagccaggatggtctcgatctcctgacctcgtgatccgcccacctcagcctcccaaagtgctgggattataggtgtggcccggccaccacctcttcttaaagaattgaaggtttatgttcttctcccctgattctatttttaattggctttatgtaattttcttctccaataaattaactttaataaggtgaaagctattacgaaagtataattaccaactaagagaatatttcatttgttcttgggtttacccactgtcaattttaataagatttttattttctaaaagacatacttgggaataagacttgtacaatcatgtccaagtggtaaactgtccaagtaacacatagtgcttttttgacgaagaaacagaacttttggattactaaaaagtatggttatgccatggatgcacgttccttgacaatgtgcctagactcacaaaatctgaagaaaataactatgggcacaggtgtttgtgtaagtccagaatcctgtagatattgatttaatatcttatctgagtgttagaatttttcaaattccactacaaattagaagaacatgttaacaaacagtaatctccatcacataagttttatatcctgagtgtttcatttcttgatatgatacaccctctgatgcagtgcacgaactccaatatctgtcaatatttgtaggagaatgataatgacgattatgaaagctaacatgtattgagcacatatggtttagttattgctgtataacagaacaccccaatatttattggattaaaaacaaaaattgggctaaaaactctcataaatctacaggttggttgggaagtcctatatatttgacttagacttggcagattgagactggctgggttgcatatgcctgtgtgtgtatggtcagtttaaagcagtctgttggctgattgaaggcttggctgggttctacttacctctcatctatgtggtttcttatttaccacaaggataagcttgggcttattctcatagtggaggcagagttccaagagaaaacaaaagcaacaaaacctcttgagggctaggcttggcactagtataccatcatatctgccacattatgttggccaaatcacggcaataggctatgccaaattctggggaaatagctgccacaactttatggaaggagctacacagtcacatggcacagggcataaatacagggtagagtagtgaactgatgctacttatgcaatattataccataacttagtatgtggcaggcacagcatgaaatactttgcacatatttcatttaacgatcacaatatataaagtcaatatattagtaatattcctatttgatgataaataacatgtaggtatggtggaaagaaaagggaatgcaaacataacctaatatatttgtagagaatagcaaaggggctactatttattattttccaatactttgtatttctatttctgagagtagacagtagaggagaaaagaaagcaactttgacgatggtaagttttcctagtggttaaatgtctgttagaatcgtttgcaatgcatctctgtgccaaatatatttaattaatggaacttaattaaaaatctgcctagtagctgtggtaagattccagctttggttagagttgtcagtttgcatttattttgaaattataaacatttcagcattttggaacaggctaacatgaaaactgctgtcagacggcatatccatttaaaatcatgggacatccactccacaccacttcacctgagtcaagctcactgccaggtgaggctaagtgctttgtggccagacagctcttgctgggattgttaatgagttcttttttaaggttgaggcaaaatatgccttactaataattctgcccatcgataatctccataatcaccctatatggtagaatatttctcatcattttctatttatttacctcgctttatttgtcttaatactatctctcatggccttacattttgttataattattttggtttacttgtatatcatggtctacccactagaatttgaactccatgaggtcagggcttgattttgttcactgctgcatttccagtgccaaaaatagtgccaagcacttagtaagtattcaataaacattgccgaatacatgaatgccccttcccagtactttattccttattagataggatattgtgtcactattcaatgtgtgtgagttccacaaatgtaagaatgctgccttttgcatgtttaacaaaattgctgaaagaatgttgaataacatccagccatgactagaacaatatggaaggtgcagaagctcctattactgagatatcgggcaaatcaacatgatttgggtcattattcgaagttgtgactctcgttctgtgccttaatccaggctatatttcccccatgattgtatagaggtaaaatctaatttaaattagctaagacatgattgaagatagtaacgtgtataaataaggaatccaaaggattcatggaccacaatgaggtttaaaaataaagacatccacggaggaaaatgacaaacgttcatcctggagaaaggatggtaacatctttttgtctgagagaagctatgtctcattctgaaggtaagtccatcaggcaatgtgagctattaaacggaatcttgtgatttttctgctttgggcatagctgctgacagggaaaggacatgcagtgaagccgatgctaaaattctgtctccttgaaaattttatttctcatttgaatccaaacattgccattccggcaaagcccagtagtctcttggaggcttgttggtacgatgcagtaacccctagtcaaatcagtttcaaggcagtggcacgagcatgtgtctgagcttggacggtggagagacagtttgggctgggtggaattcatcagtttggatagtcaagtagccttccccagggggaggtagtgacccttctgctgagagtgccatgcctggaatgtgtacgtgagtccaatgagaaggcacattatacctattcctaaagtaaaccttcgggacatttccatctagatgtctgactatattgtgttttgtttttgtttttcaaagcaaacacatgcaaaaacaaagtgattgaaaaacttagaacagaataagtacgtgccttggtcccaggactacctccaaatttacttcccaaaatcatttaaagtattcataagaggggtcatgaatatttccttctgatttttctctgcatttctatttactgtgaattatttcttggaatttagaaatacgattttccagtgagtgaacataatacaatactcatcatctttaccttgcatccttcatgctgttgcgaaatctgacttccaaaccctttacctgaagattctcgctggaaaaaccattttgcttcttcctctcgtttgctgctttatttttccccttgtattaagtgacacaaaagagttgtgatctgctctgggaaatgaacgcattacttgcttgatgcaatgcacaggcttaaactttaatggattctgcaggtaagaccagttcatagccagaattcttttatcccacagtggtgacaggaaaagaggagccagggattttcaacactgaagaataagaaatataggacattttgaaagggtaagatgatctacaagttctaaaatatttcatttgcaatttaaacatgctcttatattctacaaagaatacaaattttgtaagattttaaataattatactgacattttggtgcttttaaaagtcactggtcatctattatttagaaaaaataaagtggatttagatgtaaaaacatgcttgagtgtattcaatatagtgagaagtattagtcacttttttcccttaggctttaagttgaaataacaaacagtggcacattagactatttttatagcttgtttattacaaaattagtatttctaatgctgaagtcaagagttttcccctctgattttggtcaatgcttatgataaaactaactccagcacagtcaactcacactttcatttgtatgcatcaacgcaagttgagccaaccaatatatcagccaatcaatcattcaatcaatggctgattctatgttgtatgcttggtatggctagaagttgtgagtaaaaaacaaaaaccaaaaggttaaaatatgatatcacttcattatgagaatcttatcatttacttgttcctagcaaaatctaagctttgaagccaataggaaaggtggggagaggatgaggtctgcctggctctagcattcttttgtaagtgactttatcttggacaagaggtgggaccacctaaggctctgctttcttctttatagagtttccaaatctgttgataagattaaataaaataatattatttaaaaactagcttagttcccggcatatacatatgcactcaaaaatatgaattatgaacttttatttatgatctcattattaatttattgattgattcagcagacacatatactatggcactgttttaggtactggaagtacaaatatgtatcatccccttccctcaatgggtctatgacaaaatgaagaaaaccaaaagcaccgttgatgagataaaaattatcattattcaactaagtatacatttatataaaactttttctttgtctattccatatgtcatatgcctatgtcatagagcaattacaaaaacataatggactgataaaactagacaccagcaattactgattgcttattatgtggcaaatacttatagtgtattaatcaataagattaatcttaatcaataagattaagattaatcttattgattatcttaaacaatcataaaaacaattcactgttaaaattcctgtttaatggactgggaaatggagtctcacctgtcaggaagatggacaactacatttggagcataaacatagttatctctgatatcagtgttgcaaaacttacaattgtgtgtgggagtcattcaattttagggaagtttagtgaagccagagagaaatatccaaaggacgtcatttagtaatcttttattgaagtgtcctggataaaacagtgtgctaagcaactctccaaggaagcggcaggtagctatgatattgtattcctagaccagtcatcaccatcttttggtaaccagatcttttaaaggcctaaaaacatggtccctgcggaggctcctgtattattacactactctattagcctgttgatagctaactgttgcaagaattgactcatgctagtgagtcccattcataagatcttgggacttcagagccagacagctgaggtagttaaatctgtattattacacaggactcttggttacaatggactaaatctaatgtatactttaacaatacaagaaatccacaggttcatgtaagtgcaagttccaaagtagtattggattcatgttaggaatgacaaacttacaagatgttgttcagaacctggtttctccctgtctgtgttttgtcacttccataatgtaagcttcagtctacaactccactggatagatccccacaactcacaagacatttttccttatgacaccaaatgatgcagcaatttcaaacctcatattcttaaaccttacattccacggaaataaggaaccttatagtagcttccaaatatgaactggcaaaagaaataaaactggcatccatcctttcatattggttcaaattaggccatgcgtgccttcctgtaccaatcgctatgtccaagattgagatgagtgggtgggatgtgccaattgatgtaagctaatttacgtttatctgtgttctggtctgaagctaggtatacgctcaatatggtactatacaatctcatatttggaaacagaatgtgaattaaacttgtaagacaaatcaaaccatagttggtagggaaaatttagggggaaataatgctgaagaggaaatcatatatggacaccacagttcactgctttggctacattatctaaatctgtgagtaccagtttttacatgtagtgtgagacaaaatgcaaaagggttgatatagttcatgtttcctgtcatgtggaaaaagcaggtctgcaaaaatgtaaaagagcaatggatgaaatcaacacctatgaaggaaaaagaccatactgtagactcctgaaagcgttcaagcttcggttttcatttgcgtttgaagctctgatgcattactgtccctgtgcccctccacagcttgtttagtgacaaggtactttagtaacctaataaatttctatctttacttaggttggtttatgctgggatttagtaaattgcaaagaagagagctaaggaatactaacatgagacaaaatacaaaaatgaataatatgggatttctgttcaggagagaaaagatctaaagggcaagattagacagtttgtttactttaaacacattcctttttcctcacctctgtagatgtcactattactttctattgcatcgttttccttattccatttaattgatcatcaggtccctcagatccacccatttctttccaacactgctgccacctttccagcctgtaaaaacatctacacttgaccagatgcctgtattagcctactaactgagcacacactatggttgttagcacttttcccaaaaaaacattatccatataagagaaagagacttttagacaagggaagagtcatgctactcttcaacttgcatcctttggcagttccttattctactttgaagtgcactgaattttcttgcatggcctcaaagccctatattatggttctgctgactgatttcaccactttctcccttgctcattactccgtaattactcaggacatttcttagtttcttacatattgagttctcactgcattcggtttatcccacattcaggcccctctggctggacttctcttaccctgctcttttgatggttgtcatcttcttattctgttagttttgctttaaggtctttccacagacctttgctgaactttgactcatgtgagtcttctccccattgtcatgtctttattttcttcatagttcttataaaaacttacaattatgatttgcttgtactgatttgcttataaactatctctaccattaggctttcatcttcaagaaggtaggagctaatctgtttaatatcacatttgtacccccagccccgacatgacatgcttgcctaacgtaatgtctgtgctcaaaaatgattgctaagggaatgaaacaaataattgtattaaaatgggtgataggttggttctaggtaaattacttggagttaaaatttggtgtttggtcaatgaggaatatgggtaaaatataagctaaatggggaaaggggatcattaaatgtcagtcttaacaacatggattttaataactgctacatattgtatttgaaaaatttgtagtagataatttacatatgtcataccatctattactttttggtaatataagaagagaggtattccaactgacgtcgtacttaatggtgaaacactggatgcttttccctcaggtcaggaacaagataaggagggttgctgtcagcacttccattcaacattttattggagggtctagtttgggaaataaacaagaaaaaaatataaaagtcacatagattggaaagtaagaagaaaaactatttctactcacagataataagaggttatagatatagaaaaacctaaggaatccactaaaaattactagaacaaataaatgagttcagtgaggttacaggacaaagatcaacataaaaaattgtatttctgtatactagtaatgaacattccagaaatgaaattaagaaaacaagccaattacaatagcatcaaaatgagtaaaaaacttacacattaatttcataaaagaagtacaaggcttttatactgaaaagaacaaaacatggttggaagaaattaaataagacgtatgaaacgtcattcaatgtacacggataggaaaacttaagatagcgatacacgcctaattctcaacagatgtaccgcaatccttatcaaaatctcccatgcctttttgcataaattaacaagtagatctagaattcatatagggacccagaatagtcaaatcaatcttgatgaagaacaagactgggggactttcacttttcaatttcaaagcttactacaaagcaacaataatcaagatcatgtgatactagcctaaggacagcctgttgatcaatagaatgaaattgagagtccagaaataaagtcctacatttatggctaattgattttcaacaaggatgccaaaacaattcagtgagaaaaaaaaaaaaaaaaagagtcttttcaacaaatggtgcccagacaattggatatccacatgcaaaaaaaaaaaaaaaaaaaaaaattaagttggaccccaaccacataccatatataaaaaactaatttaaaatatatgacaaacctatatgtaagagtcaaaaatacaaaactcttagaagaaaacatgagaatacatcttcataaaatttatcagatactatactaaaagcaaaagcaataaaagaaaaaaataaattggagttcacggaaattaaaatatttttgcactacaaaacatgattttactgactgggagaaaatgttggcaaatcatataactgatgagggacctgtatctagaatacatcaaaaattcttttaactcaataagacaaatagctattttttttaaaaaaatgagcaaataaatctgcctagatatatctctaaagaagatatattgaattgcataagcatgagaaaagatgctcaacatcattagctattaaggaatgcaaatcaaaaccacaacgagataccactccaattccaacacaatggctgtaatgaaaatgacggacagtgaaaagtgttaggatgtagaaaaattggagctctcatacatttctggtgggaatctaaaatggcacactcactttggaaaacagtttggtaattcctcaacaggtgaaacataagattatcatatgacccaccaattctactcctagacatctaaccaagaaaaacaaaaacatatgcccatacaattactgtatatatcaacgtacatagtggaattattcataatagcaaaatgtgaaaaaaatccatagtccatcaactgatggatcaagaaaatgcagtatagttattcgatcgagtaccatttatcaataaaaatgaagtcctgatatatgccacagcatgaatgaatctcaaaaacataatgttatacttaaaaatacaaagaccacatatgttatgattttatttatgtgatgtccggaataggcagatctgtaaaaacagaaagtagatgaatagtcacctatggctgctgggttgggaaataaaaggaggatgggtgtgactgctagtgggcacaagatttctttttagagcatgaaaatattcttaaattagattatagtgatataaatctgtaaaacattcatttatgtactttaaacagatgagttttgtggtatgtaaattatatctcaataaattcattgagagagagagagattattaaacctaaattaagaaacaaggactgcaacagcattatgcctctagaaagcagcaaatccagatttgatccagatatgtctggcttccttcagtgtctgtgtttcagttttcctttttttttttttttttccaagcagccaaatccagctctgactaatttagctttaccttcctgaaaaggaaccacataaaagagatatgttagaaagctattgaacaggtcacaaaactgaagtgctgaaaaagcatgtctcataagataaaaggatcagtaaaattagaggaccttagtagtgggatcacatggtcaatttcttttcagtgctgctctgtatcccttcccagaaatacacaaatgtcctttgggccttgttagggttctgtgtctacccttgtgataaggggttacgggtacaagtattttcaattcgttggatcaacatgaaatgaatgggatgtttaccaaaagaaggaacactaaatagctcgtcaaatgtgctcaggcgcctctaaagccccatcttctctacctagttcttgccccctagtacagccatgtttgcgacaaaaatcaggcaagtcaatcattgggtcgaaatggtttaaaagttttcaaatttgtgtctcatagatatatccgcagaactattatatggaacataataatatttgcatatttaactttaccttgggctggggacatactaatgtatttaggaagcttcgctaattgtcagactctttggataatagattgctaaatgcaggcaataagaaatgcctaccattcccaatgccctgctatcctctgcaattgattgtattaacatcagtgatggcattctgaggaaatcactttggtggatcaaaataaacaaagctaatctagagcagagaaagctgaaaagatttggtaatagtcatatcttgaaactgtagagcttagaaaagcagaaggacatcaaaattaaataaaataaatcattttaaaagtctgatctcactattctatttttttcaattctaagaccagacagcttttaaataaagagacctggttggtgagatgttgcttctttcagaattcagaaattttaaattaaaaagtaatttctgttcattttggtgacattaagtacacatttgaaatcattttatatgtcagattggtatctcaaaatatctatataaactggaatatattagaagtatgttaaaggtactgctgataaaaaaaattgatgtaaatcaaattattatcttgaatcagtttcataaatgcttgagttcattctttcatttacctcacatacttcttcctttcttgtccttcatttctctactttgctattcctttccttattacttaattttaaaaatatttatgaataagataccatggtggacattagagataaaatagcctctgtccccatgagcttatagtctaattggagagagaaagatattaatcaaacaataaagtacacacatatacataattataaccaaaaagtatagtttggtttgaaaaataatttgaattaccttatctagactggggaagcaggaaggctgtttgaggaagtagcatttgtgttgagacttgaagtattgagagaggtctaggcaagtggggtgcttgcatgtgtggaaggagacaaaagaacgtccccttcagtgggaatggcatgtgcaaaggcgctcatggcctaacagatcaagctttctttgagagcatgaaagaaggcagcacatctaaagttcagaggatgaaaataagcgtggattgagatgaggttggcgaggaaagccaggatcatgagaggcctagaaagccacagagttttaaatgggtaagggaaaaggtcagacttgcgttaaaaaaaaaaaaaaaaaaaaaaaaaactctaactaattggccaggtgtggtgactaatgcctgtaatcctagcactttgttaggctgaggcaggaagactgcttgaggccaagagttcaagaccaacctggccaacatagggagacccctgtctcaagaaaaaaacaaaacaaaacaaaacaacaacaacaaaaaaacaactaactaatttaatgaagactacactggaaaaaaagcaggagcagatgcaaagaaaaacagttaagtagctccagatgaaagatacaggtttcattttgttagtctctgttctgtcccattagtcaatttgcttaactgtttggaaatttttctttcttatctgtaaaatgagaattaaaataatatttattcaataaggtatttatgaagactgagtgagattaagttggaaactagtcaccatgtcacaggctttaaaagtgttagctttaattacatgatgtccttggagtaggaatagcacaaggaatgaggtaaagttaactacagctgtaaaaactagtttcatttaagttgacattagagtgtaagtcttgaatatccaaagtagttgttatcttctgaaatctgagaatagcttttatagttttttattttttcgaaattatattttaggttcagaggttacatgtgcaggttggctacttgggtaaattttgtgtcacgggagtttggtgtacagaatatttcatcgccaaggtaacggtcaagtatcaactttaggtcctgaatatctgttagttttctgcctcagtgatctgtctaatactggcagtggaacattgaagtctcccactattattgtgtgattatctctctttgcaggtctttaagaacttgttttataaatctgggtgctccagtgttgggtgtatatatttacgacagttaagtcttcttaatgaattgaaccctttatccttatgtaatattcttctttgtcctttttgatcatgttgttttaaagtctgttttgtctgaaataagaataacaacccctactcttttttgttttccatttgcttgatagatttctctccatccctttacattgagcctctcggtgtcattgcatatcagatgggtctcttcaagacagcatacagtttggtcttgttcctttatccaacgtgccactctgtgctttttagctgggacatttagccaacttacatttaaggttagtatttgatcccatcatcatgttgttagctagttgttttgtagacttgattgtgtagttgctatatagcagcagtactcaatatttttgacaccaggcactggttttgtggaagacaatttttccatagttttgggtgggggatggttttgggatgattcaagtgcgttacatttattgtgaactttatttatattattatgacattgtactatataatgaagtaattatacaactcactgtaatgcagaatcagtgggagccctgagcttcttttcctgcaatcagacagtcccatctggaggtgttgggagacagtgacagatcatcaggcactagattcttataaggagcacacaacttagaaccctcatatgcatcgttcacaatggggttcatgctcctatgagaatctaatgctgctgctgatctgtcagggggcagaacacaggcagtaatgcaagcaatggggagcggctgtaaatacagatgaagctttatttgcttgcccaccactcacctcctgctgtgcagcctggtttctttttttcccttcaacttttattttaagttcagatgtacatgtgcacgttgtgcacatttgttacacaggtaaatgtgtgccatggtggtttgtggcacagaacatcccatcacctaggtattaagcccagcatccattagttatttttcctgatgttctccctcccctaaccccctgacaaccactagtgtgtgttgttccccccgatgtgtccatatgtcctcatcattcagctctcacctataagtgagaacatgcggtgtttggttttctgttcctgcattagtttgctaaggataatggcttccagtttcatccatgtccctgcaaagaacatgatcaatcttatttctttttatggctgcatagtatttcacggtgtatatgtgccacattttctttatgcagtctatcattgatgggcatttaggttgattctatgtctttgctaatgtgaatagtgaagctcagtttctaacaggccacaggctgataccgacagtccatggcccagaacatggagactcctgctttagagtgtcagtggtctaagtactttgctgcgtttttgtggtgtctggtaatggttcattgtttccatgttcagcactcctcttgtaaggcaggtctggtggtaatgaattcccttagcatttgcttgtctaaaaaggattttatttccccttcacttatgaagcttagtttggctgactatgaaatttttggttaaaatttcttttctttaaggatgctgactataggcctccaatctggcttgtagggtttctgctgaaaggtcctctgttaggctgatggggtttcctttgtaggtgacctgccccttcgctctaggtgcttttaatattttcctttcacactgaacttggagaatctgatgagtgtgtgtcttggggagggtcgtcttgcatagtatctcgctgtgatttctctaaatttcctgaatttgaatattgagctctttagtggggttgaggaaattttcaagaacagtatcctcaaatatgttctcaaatttgctttctctctctccctcactttcagggataccaatgtgttacaggtggtctgtttacacaatcccttatttctcagaggttttgtccattcttttttattctctttttaaaaaaaataatgtttttcttattttttttctgactgagttgattttaagaaccagtcttcgagctctgagattgttccctcagtgtggcctattctgcagttaattcttccaattgtattatgaaattcttatattacaaaattcttgtagtgagtatttttgctctttcagatcagtttggtcctttcttaaaatggctatttttgtttttcagctcttgtatcattttactggattccttcaattccttaaattgggtttcaactttctcctgagtcttgatgatctttgttgccatcgagattcagaattctatgtctgttattccaggagctaatgtgatcatttggaggtaagaagacactctgaatttttaagttgccagagctcttgcactgattctgtctcatctgtgtgggttgatgtttctttaatctttgcagttgctgtcctttgtatggggctttttgcttttacaggctttgatgtccttgcaggtctaactgtggagtacgttgggttcagtcaactggctttgtttctggatgatttcaaggggccaaggctcagctcactactcctgggctgcatgccaggcccatggtttgttctttggccccttaaggttgagcatcagctatgctggaggggctgaggtgtttctggtcttctggcaaaaatactcttaagggggaaaagaatgccagcaaaagcttttaatcagggtggtggcagcagggtctgtgtgtgcgtacacagcccataccagctgtggaggactgtggccacagcaccttttcaggcctgaccctgacccatctctcctcactgggtgaggcctccctgcacaaattccaatgactccagccaggagctcagggacataaccctgatctccctgggcctgcgcccctagggggagggatggcctcagtctctgtggaccagcagacttagcctttcctcctggcagttctgaggaatccaggcagcccagatgactgggtttacccccagcaaagcacaccacctccaccaagggacagtcaaagtacttccttaaacaggtcctgttccccatgccacccaactgactctccaacagggattgtcagacaccctatacaggagcgatcctactggcatcaggttggtgccccataggtcagagatcccagaacaaggagaggcacccatatttgctgttctccagcctccttgagtgacatctccagtgcaggagtgaaccagttgaatagggcctgaagtgaatttccagaaaaccacagcagccctacagaagagggacgtgaccattgaaagaaaaacaaacagaaagcaacaacaacagcatcaaaaacaacaaaaagtccccacaaaaacctcatccaatggtcaagcagcctcaaagatcgaaactagacaaactcattatgatgagaaagaatcaatgataaaatgctgaaaaccccaaagggcagagtgcctcttctcctccaaatgattgcaatggttctccaacaagggtgcagaactggacagaggatgagaaggacaaattgacagaagtaggcttcagaaggtgagtaacaaaaaactgtgccgagctaaaggagcatgttctaacccaatgcaaaatagctaagtaccttgataaaaggttaaaggagcttctaactagaataaccagtttagagaggaacataaattacctgatggagctgaaaaacacaggatgagaactctgtgaagcatacaaaagtatcaatagccaaattgaccaagtgaaagaaaggatatcagagttcgaagactaccttgctgaaatagggcatttagatgaggttaaggaaaaaacaatgaaagggaatgaacaaagcctccgagaaatataggactacatgaaaagactgaacatacgattgattggagtacctgaaagagacatgaggaatgaaaacaagctggaaaacatacttcaggatattatacaggagaacttccccaacccagataaaaaggccaatatacaaattcaggaaatacagagaacaccactaagatattccatgagaagatcaaccccaagacatataatcatcagattctccaaggccgaaatgaaagaaaaaatgttaagggcagccagagaaaaaggccagattacctacaaaggaaagctcatcagactaacagcagacttttcagcagaaaccctacaagccagaagagagtggaggctaatattcaacattcttaaagaaaataatttttcaacccagaattttatgtccagacaaactgagcttcataagcaaaggagaaataaaatcctttccagaaaagcaaatgctgagagatttcatgaccaccaggcctgccttgcaagagctcctgaaggaagcactaactatggaaaggaaacaccggtaccagccactacagaaacacaccaaaatataaagaccaataacactacaaagaaactacatcaattagtgtgcaaaataaccagatagcaccatgaggacaggatcaaattcacacataagaatactaaccttaaatgtgagtgggctaaacatcccaattaaaagacacagactggcaaattggatagagtcaagacccataggtgtactgtattcaggaaacccacctctcatgcaaagacacacacaacataaagaaatggaagaaaatttaccaagcaaatggaaagaaaaaaaaaaagcaggggttgcaattatagtctctgacaaaacagattttaaacaaacaaagatcaaaaaggacaaagaagggcattacataatggcaaagggatcaattcaacaagaagagctaactatcctaaatatacatgcacccaatacaggagcacccagattcataaaacaagttcttagagacataaaaagagacttagactccaacacaataatagtgggagactttaacaccccactgtcaatattagacagatcaacaagacagaaaattaacaaggatattcagtagttgagctgagctctagatcaagtggacctaatagatatatgcagaactctttaccccaaatcaacagaatatacattcttctccatgccatatgacacttattctaaaattgaccacataattggaagtaaaacactcctcagcaaatgcaaaaggaatgaaatcataacagtctctcagactacagtacaatccaattagaaccgaggattaagaaactcactcaaaaccacacaattacatggaaattgaacaaactgctcctgaatgactcctgagtaaataatgaaattaaggcagaaatcaagaagttatttgaaaccaatgagaacaaggaaacaatgtaccagagtctctgggacacagagaaagctgtgggaaatttataacaataaatgcctacatcagaaagctagaaagagcgcaaatcgacaccctaacatcattattaaaagagctagataaacaagggcaaactaatccaagagctagcagaagacaataaataaggtcagagaaaaattcaaggaaatacagaaataaacaccctcttcccaaaaaatcaatgaatccaggagctgttttttagaaaaaattaagaaaataagtaggctactagctagactaatgaaagagaaaagaatcaaatagacacaataaaaagtgacaatggggatatcaccactgaccccacagatatacaaactaccatcatagaatactataaacacctctgtgcaaatatgtctagaagaaatggataaattcctgaacacatacaccctcccaagactaaaccagggagaagctgagtccctgaaaagaccaataacaagttctgaaattgaggcagtaattaatagactaccaacaaagaaaacccagggccagatggattcacagccgaattctaccagaggtgcaaagaggagctagtaccattctttctgaaactattccaaacagttgtaaaggagggactcctccataactcatcttattctgcattatcctgcaactcgtctcatccagcattatcctgataccaaaacctggcagagacacaagaaaaaaaacttcaggcctatattcctggtgaaaattgatgcaaaaatcctcagtaaaatactggcaaactgaatccagcagcacatcgaaaaacttatccaccatgatcaagttggcttcatcgctgggatgcaaggctggtttgacataggcaaatcaataaatgtaatctaccacataaacagaaccaaagacaaaaaccacatgattatctcaataggtgcagaaaaggccttcgataaaattcaacatcctttcatgttaaagactctcaataaactaggcattgattaaacatatctcaaaataataagagctatttatgacaaaccaacagccaatatcatattggatgggcaaaagctggaagcattccctttgaaaaccagtacaagacaaggatgtcctctctcaccactcctattaaacatagtattgggaggtctggccagggcaattagacaagagaaagaaataaagcgtattcaaatatgaagagagaaattcaagttgtctctgtttgaagatgacatatttccttatttagaaaacctcatcatctcagcccaaaaactccttaagctgataagcaatttcagcaaagtctcaggacacaaaatcaatgtgcaaaaatcacaagcattcctttacaccaacaataaacaagcagagagccaaattatgaatgactcccattcacaattgctacaaagagaatataatacctaggaatgcaacttacgagggacgtgaaggacttctttaaggagaactacaaaccactgctcaaggaaataagagaggacaataaacaaatggaacatacattccatcctcatggataggaagaatcaatatcgtgaaaatggccatactgcccagagtaatctacagattcaatgctattcaaactaccattgaattcttcacagaattagaaaaaactactttaaatttcatatggaaccagagaagaccccctatagtcaacacaatcctaagcaaaaagaacaaagctggaagcatcatgcaacctgacttcgaactatactacaaggctacagtaagcaaaacagcatagtactggtaccaaaacaaatatgtacaccaatggaacagaacagagacctcagaaataacaccacacatctataaccatcttcgacaaacctgacaaaaacaatcaatggggaagggatttcctattcaataaatggtgctaggaaaactgactacctatatgcagaaaaccgtaactggaccccttccttacaccttattcaaaaattaacttaagatggattaaagatgtaaatgtaaaacctaaaaccataaaaactctagaagaaaacctaggcaatatcactcaggtcataggcatggacaaagacttcatgacaaaaatgccaaaagcaattgcaacaaaagccaaaattgacaaatgggatctaactaaactaaagagcttctgcacagcaaaagaaactatcatcagagtgaacaggcaacctacagaatgggagaaattttttgcaatctacctatctgacaaaggtctaatacccagaatctaccaggaacttaaacaaatttacaagaaaaaaaatcaaacaaccccatcaaaaagcggccaaaggaaatgaacagacacgtctcaacagaagacatttacatggccaaaaaccatatgaagaaaagctcaacatcactgatcattagagaaatgcaaatcaaaaccacaatgagataccatctcatgccagtcagaatagcgattattgaaagttgagaaaaattagatgctggtgaggctgtggagaaataggaacgcttttacactgttgatggcaatgtaaattagttgacccattgtggaaaactgtgtggtgattcctcaaggatctagaaccagaaataacacatgacccagcaatcccattcctgggtatatatcttaaggattataaatcattacactataaagatacatgcacacatatgtttattacagcactatttacaatagcaaagacatggaaccaacccaaatgcccatcagtaacagattggataaagaaaatatgacacatatacaccatggaatactatgcagccatgaaaaggaatgagatcatgtccattgaagggacatggatgaagctggaagccatcaccctcagcaaactaacacaggaacacaaaaccaaacactacatgttctcactcataagtgggagttgaacaatgagaacacatggacacagggaggggagcatcacacactggggcctgttggggagtgggtgcctaggggagggaacttagaggatgggtcaataggtgcagcaaaccaccatggcacacgtttacgtatgtaacaaacctgcatgttctgtacacgtatcccagaacttaaagtaaattttttttaaaaaatgaattaaaataaattaaagcatgttgagcttgttaagtagatagttaaaatactagttgtcctatcttgtccctttaagtactttctttaagctttgctatagcagatcttctgtggccatcactccaaggacagtttgaccatactaaggcataatcccactggttctccactgaatgtcccaggtgtttcctgagaactctccattctggctcctcagtgctgaaatgtctctctaccatatgttagctctagaaatggtttggtttacaatttttgagttgttcatttctcagcattgtggaatttcattgtttgtatatattacctaataacctacaacttaagaggattcctatgtagatttctgagttatatgtatatgccatactttatccattcatctgtcaatgggcatttcaggtatttccatactgtggctattgtgaataatactatcataaacatgagagtgcagatatctctttgagatcccttttcaattcctttgaatacgtatccagaagtgcaattgctggatcttgtggtaattctatttttaatttttcatggaaccctcatactgttttccatagtggttggcaacattttacattcccatcaatagtgtacaagggttctaatttctccacatccttgggaaagtttgctattttttttaatagcagacatcttaataggtgtgaggtatctctttctgcttctgacttgtatttctctgatgagtggtgatgttgagcatttttaaataattgttggccatttgtatatattctttggagaaatgcctattcaagtcatttccccctttttaaataaggatactatttttttttttgctactgagttatcacaacagcttcaaaaataataaaatacataggagtaaacctaaccaagaagatgaaagccttgtgcaatgaaaaccacaaattagtaataaaaagaaatcgaagaaggcacaaataaatggaaaacattgtatgttcgtattgttaaattattgatactacccaaagcagtctacaaattcaatgctatacctatgaaaattctaactgcattttttacagatacatagaagcaattttaaaatttatttataactacaaaagccccaaatagccaaataaaccttaaggtagaacaaagtcagatttcaaaatacattacaaagctccaagattaaatcagtatgatattggcataaaaacagacatataaacaaaagtgacagaatagagatctcagaactaaacccacacatacatattcaactgatcttcaaaaaaggggccaagaatacacaatgggataagaataatctcttcaataaatggtcttggaagaaccggctgtctgtgtgcaaaagaataaaattggacccttatcttacaccatacatagaagtaaattcaaagtgaatttacaagttaaacaaaagacttgaaactatagaaaccttagaggaaaactaagggaaaagctccatgacattggtcttggaaatttttgattgtatatgacaaacacacaagcaacaaaagtaaaactggacagataaaattacatcaaactaaaatgacccttcgtggtaaagaaaacaaacaggataaacaggaaaactgtggaatggaattaaatttttcaaacatatatctgatagggaattaatatccaaaatacataaggaacttacactatgcaatagcaaacaacagcaactaaataatggggaaagaatttgaatagacatttcttccattgtctttaaacagttttatatattttgtctagttttctagcaagaagttaagcttagtccttgttaccccgtgtaatctagaaatggaagtaatgtcgtggaccagagacttgactgatagtacgcctcatattttaacttatacataacctgtgctacatttttgctttgaatttctacaattccttcagtatctactaatgattaataatataattaaagttattttctgtgtagtttaagcttccaataccatccagtatcatccatttgatgataagatgacattctcaaaatgatttcaggattttgaaacttttaaacatcataaacaaaatgattattctggtgaaaaaatatcccataaaaatcttaaagtagaatgttactgagtgtttagaaagttaatgtgtgggaccaaatatataaaattgatatctggggaaccatcaaaatctacttagaagacattaagttatttacaaagcacttttttaacagcatttgctgtttgatgtttaataacccagtccttcaaatattacatatcactagaattaacatcaataaaaatcattagtgcctagtttgcaagcttcccttgcttttattttattctattttcctaactccttgaggtgggctcagagtccttggttgtagcaaggccagagagcagtttcagtggtgaacttgtaaaatagccaatattcccagctaattcacactggctatccagagaaggaaattcactatctgccagttgaaagtccctaggtagaatgaaggcgacattgtaagtctgcaaaacatgagtttactgattcatatttagatgagctaagaaaagttcttgagaatctcttgagcagacaggctcaacatatctttttggggacacaattcaacccattgcaaacacagtagtatgcattttgtggcacactaccagtgcaactcaatgtcttttagtaaattagtagatactaatgcaactgaatgtcttttagtaaattagtagatactaatgcaactcaatgtcttttagttgaattcttagtattcaactaaatgcataccaccacagttgcaccattggaataaactcttgccaaacttattccaatgctttcaccaaggtggaactgattaattcgtatgtttttctttttaactgctgtttatttcatagttaaatagttttttttttcttattttagtgtctcaaggagaagactcagtgccagagcaaatagaaatagcagctggtagaaacttaggtttctcttgaccaagcttcacctgtgtccttaacagagcttattctagtgctcataaatgcacagacgtcatggagcctccttccttcttaactcattgctgtcaaaaaaaaaaaaaaaataagaaaataccacagtcttggcttgatgaccagagaaagtcagcaaagcaagttgtattagtttcctaggactacaatagtaaaataccacaaactggctagcttaaaacaacataactttattttttcacagttctgggggtccagaagtctgaaatgaaagtgttagcagggtcacattcttgctgaatgttgtagatgaagatattttcttacctcttccagtttctggcagttgccagcaatcattggtgtccctgggtttgcagctgtataactctaatctctgcctctctttccagtgttctctaagcatctgtgtctgtgtctcttcttctaaggataccagttttattggattaagagcctatcctattccagcatggcttcatcttaactaataacacgtgcaatgaccctatttccaaataagctcacagtttccagggctttggacttcacatatatttggggggatgggagggggacaaaattgaactcattacagcaaaaacatctttcaaactgttttttgtccatattgttatttttatttttaaaggtattttttccccaaaatgttaatattatttatcatactatacacataagaaagtatttgcctataaactgttattctcatgctaatactttcacttttatgtattccttactggttcaatgtgggttgctatattgatctggtctcacgctgctaataaggacatacctgagactgggtaatttataaagaagagaggtttaattgactcacagttctgcatggttggggaggcctcaggaaacttagaatcatggaggaaagcacctcttcatagggcagcaggagagagaatgacagccaagtaaagggggaagccccttataaaaccatcagatctcgtgagaacacactatcgtgagaacagcatgggacaaaccattcccatgattcagttatctctacctagtccttttcttgacatatggggattattacaattcgagataagatttgggtagagacacagccaaactatatcacttgctatactgacaatatcaaggaattgcatattttcaaagagttgagttttcattcataactggccaaagttcatcattcttcttcctctttcttctccttcattctctctcaactatgtcattaggaactcaatctttattttctgtcatttctgtatcttgttagggtgttttcttcatttctccataataattttccagtgaaactatgcctttgagacatgttcctagagagtgctttggaagccactaaagctagagcttatgcaaccatgataaagagaaagtcccaaacctcctttacaacatctcatgtgggaaagaaattagaaattatctagcctggaattgttattcaccttataacttaagcacaaattttcttttcatccagtacttcatatcttatttctgtttccttaaaaccgaaagttatgtctatgataggcacctgagtgcaatagtttgcagtggaagcaagagaagataatgtgggcatacatactttattttatttttttgttctcagggttggctttttcctttcttaataaatgagtgacgcacagccatgggaaattgagtcaaaagttaaatgaaataagccagaattaaagcttttttcatgagaaacttcttttgggaaacagggtctcatttggtcacccagactggagtgcagtggcaccatcatggctcaccacggcctccaactcctgggatcaagggatccgcccacctcagcctctcaagtagctaggactattggcatgtaccacgatacctggctaatatttttatttctgtagagacagggtctggctatgttacccaggctggtcccaaactcctggcctcaagcaattctcccacctcagcctttcaaaatgctgggaatacaggcatgagccactgtacccacccaggacatttcttttttaggtgaaatttctcgcaggacttcagacctcaactgaaggactgtatgaggaatattagccaagtttgaaatgggagccaaataatggaaatttttatctcctggtattttgactctcattttttccccaacttccctgcctaacattccacagtagctacttttttacattttatgtaaagtctgggaatatgtgaattgtatcttggtctggtggacctatctaatctcatctcatacttttgtccccttgctaatttgctgcagctgcccaaatgtcctcctcatccttaaaatcacaaaactttcccccttcccattggctttagtctcattttaattttggaacctgaatgtttctttcttgagacgtttatgacacaggtcaaatttcacccctactcctaccatcttattgcatcatactctaccatattactccttttcatttcattggtttggttatcttctccattagactataagctgcatggatgtggagctcttctgtgctcatttgttgctatattctctcagttctgaactgaatgtgtaatattttatggattttcaaaaatattttgttaaataattgaatgcatgtttcccttctctcatccctatgataacaaggggggttgttatcatttctatgataacaaattctatccataagtgaacattagaatgaaatcaaagctttcccaataagaattggaataaagttatatttcactcagctttacctctatctttgagtatgaaaaagagaacaaaaaaagatttacaaacttgtgtccaaacctggaacagagtgaggcaagagatgtgcctaaaatgcaaactttaaagaggtatttacttacagggctatgcaaggagtgacctgcaattgggcaaccacgagcgacagactccttaaattgtgtgtcctaggtgactcgtcacttcacctgagccctgactctgcctgtgttttgactacagtttttttcaggagtttaaaacattatctcacaatagaatcagtatcacttttcttgcttagaagtagggtttcctgataaaatacagaacacccagttatatttgaattccagataaacaaaaaatatttttagtataaatatatctaaaatactgcatggaatatgcttatactaaaaaaaaagctaactgaaattctaatttaacaattcattctaaattttaatttgctaaatctgaacatactacctgtatgctttctgaatgttaatcatcttatggtagccatgttgtggtagatttcacctcaacagtaatctcatagagaggagggtctcttctgtcctaggcaaccgcatctaaataatgaaatgccaagttgagaatctcacaagtcattgcagtgctgttctaatccttccaatcctgtcatttttctttgcaatgagaacatatctgatcaagtaaacgttactactcaaggctttcagaaaatattgaacatgaaatttgagtttttcaaagcagccaaaccttctttaactgtttgaaaattttgcatatttactaatgaccaattctgcagcgatctatgctggacagcctgggagaggattgagctgatgtatttctccattaccttcttctcaagatgcttaaaaatatgccaggtatgcagcttgttgacaaagcccccttttacacagactgtatttcaattcctggaaagggagcaatgacactttggctagaaggagaggatttcacttggagaaagattatttcttttcttctttgactgttgccttactgaacctttctcagagcaagaaacaaatacataaaggtggaggaattcgcttcagcaatatcagataggaagatgcatacagagtaatagaatatccacacaatgaattacctatgataggaaaagagaaagaacttatcaaaaggcaatgtgttaacataatctaaatagcagaacaaatattccagtatctagtagtcaagaattaaaaccatttgttatcatgggatgaacaaattaacagatacagttataggaagatagaatactgtagacatatcagcttctatatggttatttatctgaatactcagatgtggttgctgtgtcaaatagggtattacactacgttagtggtttcaaaccctgcctaaatactagacccaagacatgcattgaggtaagctctttattttaggcttcggagctgaaaatctgtattttaagtcttcttaaaggattccaataggaaaaatttaggggtataactatacttacttattaattcacagagtcaacaaataccagaacgttgattaagtactaagaactattatatttcttcttccagtttctagctcttataaactttgattctggtggtgagattaaaaacaagcaaataagcaaaatgaaaactgaataaataatatgtcaaatagtggtaagttctacaaagggaaatgaaacgggataaggagggagagtatggacttgcggagatggctattttaaatatgatgataatgaaaacctttacaatgagaccagaatcaaaagagcaacacagacacagaacacatcaataccctgaggcaggaatggatttgaggaggttcatggaggagcagggaggtcactgtgtctgggaggcagtgagcaaggaaaatgttgacaaaagatggggttccataggcatccagggatcaggcacccacagccttgcaggctgtgataaggaggctagattttgttcttcagataatggaaatccattgaaggatttacagtagggaagtgatgtgagtagatttttgtcgttgttgtttttcttttttgaagcagaatctcactctgtcacccaggctggagttcagtggtgccatcttggctcactgccaggttcaagcaattctcctgcctcggcctcctgagtagctgggactacaggcatgtgccaccacacctggctaatttttgtatttttagtagagatggggtttcaccatgttggccaggatggtcttcaactcctgacctcaagtaatccacccgcctcggcctcccaaagtgctgggattacaggtgcgagccaccgcgcccagccttagattttattttaaagtgtaattttggttgtggaagtaggaatctcagtgacatgcctatgtagttgtccaagtctaccagggtggtaggagtggtggaggtgagaagtggctggattcaggatatatttttgaaggccaagggtcaatagaattagctgattaattggttgtggtttgcagaacaaaggcaagattctaggatgacttcaaatcttgggtctgataacttggccaatggagataccagttatgaggttggtgaacacttgggaaggagcagatgtgggcattgagggatttggagtttattttggacatattaattttgaaatgcttctttgcatccagtgggagatacccattaggcagttcaatcatataggctcatttctaagaggtttctagactgaagatatgaatttaggaatcatcaacatttagatggcatttaagccatgagatcaattgaataacccagggagtgagtgtaagtggagaagagaggagatccaagtcttagccttgcagtggctaaaaaagctgatatttagaggtaagttagatgaggcagagtcagtgttaatgtttctcaagaagcactattagcattttgggtggaagggtgctttgccatgcaagacagatgtgaagattatacggtatttagaatctctgaatccacccagtaatagcagtgccaccccccagacattgtgacaggaaacacatatttgtatttgccccctcatgtttgtaaactacatgtatttgttccccacctatttgcaaatcactcaaaagatatgtactgctagaaaaccattgactgcatggctattaaaatcactaaatggttttaagtatccactctaattataacattttattttaggaattatgagttacaaatatacttggattagaaaaatacatattatgaagtgttacagtattaggaaatgtgaacatttgtttgtaacaatctcttagggccaagaaaatagagcaagctcaaaaaagcagtaaatctactttaaccatgctgtcacttactctggattaactgactgattctcttaatatcatttgtaaaacattctgacttttactcaaggcataataaatgctgggttagtaaactaattttcggaatacggcacacttctcagcatcctatccctgtgtttaaattatgtgctcagttgtttttgttcccaaactattatgcttaaagggtctatgatattgtaaatatactacttattttggcattatgtagattaagaaatcaatgacatattgtacactatttcaaaatcactattccatatgatggtatccatccactcatttctacggtgataatgaggtcatcatatgtgtacattttgatagggtttgggttatcaggaatatgtatttgtcaaaacaaccacccccagaatcaaacaccatttttatcacagattattttttctatcctgtaatttaatataagttggatttcatataaatcgaatcagacattatgtactctcttgcagaggcttcattcactcagcacgatatttttcagattcatgagtaaggctttgagattcactgggtgtattataacttactttctattgctaagacatgttccattgtaaatataaaccacaatttctttactcattttcctatgggtggacatctgggttgttcccattttggggttattatgaacacatatactataagcattcctgttaacataagcatctactatatatatatctactatatatgtgtatatatatctactataagcattctctttgtcaacatatattttcacttatcttgagaaaatacttagttgaattggtggtccacagtgtaggtatacatttagtttcacacaaaactgccagatttttctctaaagtgactatattatttcacattttcacccaaaacatatgggaaatttccagttgtttcacatccttaacaatacttgatgttatcaatcttttcactttcagccactctgatgagtgtgcagtgagcggcatttcattgtgatttgaatttgcatttttccgataactcttgaagccaaatattttttcaaatgcttgaccattcatataacttttttgtgaagtgtttattcaaaaggtttgccctagaaaagtctactgtagatattaaaatttcaagttactatactaaattcactttagaatagttaaatgtcagtcaacattgagggaagcttgtatatgcaatatccaattgtcaagcaaaaacgttatttatactgtgcgttttaaaataattatttataagtacctttttatctctattgatctagtaaattaagctgatttccattacaagtttattaatttactctaattctgaagaacaatattggatatatgccaatacatgtaattcttatgaaatttaattgcaaaaaatagaaaccccagatcacttatgatgatgttctatttaagtatattagactattaatttatctcatttttctgctactattggtacaaaactacttgtgttttgtttaagaaatagcatccagcatactttggtctgaaaaaatactttaagtctgatttgatctgcttcattcaccaactaaaagtatatatacacagtgatatccagtgaaaatttcatgtgaaaaccaatttttgataaacacgtagctgggtatgtccctgagtttgtacattacagtttttattacagacaagagactgaaaaagaatgtcaagaaatccgaagtatctatgctgcgcagttaccagtaaatatacttttaagaatctgaggtaatacataaaatgcatattcagattataagaaaccagaagcctgtttgttcatcctcatggaacaaataatatagtctttgaatttggatttttagtgttgtccagagatttttattttcataagtacatttttaacctcacaaataaaataaggttcacataattcagaggaataatggacaaaacaaggcattcaactcaaactttggtcagcaaccatttacccacaagcctttctagataataaaatagtaatttgtaaataatgtattgcagcattgagttcatatatagaaaacaaaaagcattttcataatcctcctggacagtcagcttttctcatgttaaatctattgtcaacctgcctcgagcatgctgtttgagcaaaattactcactccaactccaaacagctcgcattctacataataataccattttacaattggcatttgctataataaatccaccttggaacacttaccttgtcaatcagtattgaggaaaggtcatgctgagccatgaaggagaagactacttgtgtataagctatgaagtcttttatgagactttttaatcaatctcttaacatgcactgaaaaaggcttaagataaaacaaatagtataggatttttttttggagggggtgtttgttgttttggttgccattgttggaagatggctgattttcctaaaaaataatagagtgaaattagtacaagcaacttaataatgcagctacagaacatatgagttttacagattttccttaaaaaaatagagttaaattagtacaagcaacatagtaatgcagttacagaacatataagttttgcaatccaaagctgataaattgttacaagccgcttaggccactttaatgtcatttttttttttttctccaagggcattgagtgataatgcttggctggtacttcaactacggatctgtgggaaaatctgttgcttaggttgtttctacgttttcattattctgcacatactctgctcttccgacactgctaactgactggtcagattataggtaagagagggatagatgatattgtgtagggcagggtcaacaaactaaagttttagtgggatgtagccatacctatccattcacttattgttcatggtttcttctgtgctacaagagcagagttaagcaggtgcaagatagcccctctgcctcacaaactctaaaatatttgctatctagccctttgcagaagaagtttattgacctctagttcaggggtatagcatttttccattagatgcattatatccaaataataccttcataaaaagatgtccaagatatttacataaagatgttcagaaaaagaagatctatgtaaaactgaatacagtatatctattttgggaggaaccattaatttagaaatgtctgggcttccccaatataccatcttcagatctgtgctaataatgactgtaccttcctaacgcacacagttttagttgggactatgttcagaattaaaactaaatttcccaacctgccttgcagctaggtttgaccagacaatcaacattttcgcaaaagatgtaggcacttgtcatgaatgtaaatttctgctcagtttggtgcaagcctttctatgttccctgtgtctttcctgctggctgagatattgatggtatggtgagtccagcaagcttctcggacctttttgctaaaaataaacaaccatcaggaagatggaattatggattctcaacaagcaggcattgccatacgggctctgaactgttgattccacacagttttgtatttgttttaaacacagttgattagaacgatatggatttaagccattgctcctttggaattttcattccatgctacattctcagtacgtacggtgacttttttgtaaatggtggctagaaaggaattcttattacatataatgggcccttgttagatctgcactttggcccttcccttctgggcacgtctttcatttctcccctccatctatatggataaagcaggaacatttataattataaattgatatgtgagattctcccttacttgccaaaattaattggaccaaaattaggcaaaagaccgcaacagggcaaacaacaagtgacaaaagtcacttgtctgggaattgtttccattggggaactgcgatgcatccaaagaccatattttctgacatctggacttgaggtggagaacagagaagctctgtatcagaagagaatgatgcaaatgtaatcgtaaaggcaattagaagaagaggcatcctgagaactaggaacccctgcttccagttctctcattccatttctttttcctggtaccatgagacacccatatttagtggttaaaattgttcagctaccaattcaaaagtgaaaagagatggaatcttatgtatagtgtttttatatgtaaaattatattctgctatgggacctctttctgccaggtggtagaaatttaattttaagcaattcgggagttcccaattccttttctctgggattccatctcacttcctgggggtttctgtagtgcaaagtattgaagatatccattcctcagtcagcattaccaatctacattgaaatacactggaaatgtaatctacaaaaactgcactgctcttgaatttaagtgatatcaactcccccatatttttgtaacatattatatattcgttatcattgagttaaaccaaatctaccttagagttacttgttttttaatcaaaaactttatcttgggataacaagcattacatattttctaccccagtgattctgaattctcaaggcatgtgaatcacctgggtagctttttaaaatgcaaattctggctggacagggtggctcacacctgtaatcccagcattttgggaggccgaggcgggcgcatcacctgaggtcaggaattcgagactagcctggccaacatggtgaaacatggtctctactaaaaaaaatacaaaaattagccgggtgtggtggtggtgctcctgtaatcccagctactcaggaggctgaggcatgagaatcacttgaatccaggaggcagaggttggggtgagccaagattgcaccactgcactccagcctgagcgatggaatgagacactgtttcaaagaaaaaaaaaaaacaaaaaacaaacaaattctgcttcagaaactgtgggatggggctgagttcctgcatttctaacgggctcccaggggatatcacattctgaatgtctgtgtaccacaattggaatagcaacactctaactcatgtataaacacacaacttccttttatttgttttatacatcattgtatgattccttgcttgtgtttcttaattaacgtctcagtacctctctatacaccattcaaagtatttaacatactatacttttgggttcatttttgtcattacaactaaagcttctatgtattaagtaatgtgttcttaatcttcttatttagcacgtttcatgatgtcttttggcagacagaagaacactccactgagagtcaagataaatattttcaagtatagactctattgtgattcaaaatatgtccttgagtcaaattcactttttgagtctagtttccacttataaattggggataatatctgccctacttactcccacaatgttgtgaggttatgaaaggaaatagtagatatatgagcatgttctcaagaaaattaccatcgaattgcaagtcatcattcttattggtattcctttgcagttggaaactgtccatttccaaccattttcattgctcctacaatgaccccagagtgttggaaatcttgctcatgaaaatacctatcctacagcttcttttgtgacttcaaactcagccatcattaatatcttatttagatgggctccagtttgtgtagacagaccaataaaatgcttattcatcctgaattattcttctgggaatttttttttgaacttcagcctaacatctcatttcaaagtggggaaagaaaacatcagctactgaaaggcactgcatttttaatgtacagcttgaaaacactgcacctggtgagtacagaaacacatctgtccatgcaactgtcaaagatggctcatgctctttacattcaaaaatagcttcactgacataggattcaggtgacacaacatggtggtcccagggtttgggaaccatggccacaaattctctttttatatctatcttttagtgctaaagagaattatattattgtaaagcaaatgtagatttgttcattcttaattccaaatcagttattagtgctcaagtctgataaatcacatgtataaagccacgccaagcagatagaaggcagtcaaagcagcaacaaacatgcagacattccctcttctgctgccacatcagaaaggagcagagctaaagcttttctgtttgtttggttcaattttaatggtatagctttctcagctctgttagaaaatagagatgagaaaatgtcacccaattcagaaactagagctaaggctgtatttttttgatcaagaaggaagagagaggagggtctctcgggtgggttcagtaacacatagagtagtcttttccaagcactaaatgccctacagccgtagtcagcaaagccgaaggcaaagcaaaacacctggcgttctgctgctcttgctgctgctggcactttgcatgcctccaatggatgattctttccaaatcaggaaaagtcaaacttagcaaggatttacaaaaggttctgggcttccatcaatgtctttaattcttttattttttatttgattgttgtatcatcctcaaaacatgatctatgcaggtagatttagattcccactacctattgtcatacagattctcctgtcattcttcattcattcacttctctattcaaagaatattcactgagggccaatatttttgtatttattaataggcatagtatagatgctggatatatgaagataaagcaacagaatagacctctgcctggaggagcagtgctcctccacatacatcctggggcctcctttcctgcaatgcatagtacattccaggtaaggcagaccactttctttctctatgacaggtgtaaagttattatgagtgctccatttgagacccaaactgctttttctgtctctatgtgatgtcttaaattcttgcagtcatatggatccattcaaacctctacccatacttatggaagatgctttcaatcctttctctacctgagaacccaacaggtactctgggaacccttggttgtgcaagaagccccagggacctctagaacagaaatatcaggtgtggatcaagggtgtctccatttccccactcgtttgtctatggcagacactggtgatcatttagcatacattttctcactaaaatttagtacagcctttgattcaaactcaacacttgtccaggcagccaaattaattattcagtattgttcccagagatgaaatctatttgctatccttggttggaatttgctacatcctctgctgctcctttggactcattgatttgttttcatcactaagaattcacagttcacattaggtgcaaagccccgtaagatcactcaggtcttattcatttgtattccaaaataacccatcatcatcagcactgattgatttccccttaagataaatccaacctgtgtaaactccaatcatagccacacatttcataatcccaagtccttttacacaatggtcttatatccaagaatctccaggctttattcgttataatgtactagctggtcaaactgacaacaccagattagtttaattatagttcacatcattgtttaatacaagttgtggtagaggggaatgtggtagatagaaggggttctactctcaaaaatcattcagagactccagccctttatactatagggcattgtttcagtaatgctctagggaagctcacctccatgcagttctcaaggatccatgatgcttttatctcctggatccacattgtggtccccctggttattctcaaagtgaaagacaacataaagatatacaccagctttaaatgccctgaactgagacgtggtagacctcattgtgcccacaatttttattttttggctagaaataattacatgaaaccacccacctgcatggcagctaaggaggttgttttcacatgtgcctaggaaggaggagagaatcacacatggtgattactagttatcgctactacacatgggctgtgttctcaggaggctaaagaagtagaatgtggtaaacgtacagctttgcctcaaccacaaggcctccctccctccatcttctcagaatgccctggaagataataggccctctctcttttacgtttaattttaataaataccaagtactgattagaaagtaattagaatgtgttttttttggaagacactaacgttataattgatttttaaagtggttttattttcaaacatatggtttcagagatttttagtttgaaggtatatatcagagagaaatttatttattacagttagagaaatctgactggaacagtcataaaccattgaaaggacttattgacttgcgtatttgaaagatcttggaatgggcaaatctaggtgcacacatggtattgtcacgaatttgtgccttaccctcttccagccctgttttccatgtgtgggcttcatcctgaaacaggcttgtctcaagctgtggcaagacagctaccagcagctccaggcattccccagggaaggaatgtgtgtgtgtcctagtgatcataatgaaagtcagggagaaaatgctcctggacttcgctgggatagtcatccattcatttactcaatctagggggataatagaattggctcggcttgaaattagactatatgtcatctgaatctaaattgtaaaatagagatgggagatgaatagtttcccagaggatagcctgattgttgttaccagaaaacagaacaaaatatacccacatggttttctactacataacacaaacagggggagattgcttttctgcctaattagggcctcatggtgactttgccctaaaaaaaaaaaaaaaaaaaaaaaaaaaaaaaatcgctgtggcccaggggctgatcattagaatttcccatctaaaatcctcatttttgattgcagcaggagacatttggtctctatgataatggcttgtgccaacccaactcacagggactacataaactagaatgctggtttcttaactgtcggtaagaaaaataacttcctagttgagcataaaatttgagctacactgaccaactccttttataaagctaaatatgtaacagggaagagaaattaaaaccagcaggacattagttgagcatggaatcagactcagggtaattagttaaataaaaacattctgtgacatgtacccattattgctcaatatatgtattgcagtggcagtaatatactgtctagaaggctgtcattcaaataggcttgtaggcatactctgccacacccccaatgggttgggttctgggtgactattgctacgttgctgattccagtcactatattttcacaaggaccatttccttccattgacaccttatttaattaaatagtctccatttgctttttgattaagtaacagttcattaataattagtatatcttgatttaattaggcaaagtgtcagaaatctcggcctacgttgattgcaacaagtgtttgaccacttatcagaactttctatataatttcaaagctgaggaacatttctgtaatgggataagctatttaaaaccagtagggtaggcagaaaatacttgctggctgtctgaatgaacagagctttgtctttcttcctggattttcttttcttcttcttgacattttgcaagccacactggtgaaatatatcaattaggaattttctctttgcatgtttaaataagtgcaaaatgactcttaaaaacatgatcatttgtgaccttattttatatagttttaaacttacatgaagtcacaagactagtacagaaagtgttcctttactctttactcgatttaccaattgtttgtattttgccctactagatccatcattctttttctatagagtaatttaaagacactgtggcttttcccctagattcttcagtgtgtattttctgaaaacaggaacagttcttacttaacaatagtatgatgatcaaaatcaggaaatttaacattgataaattactattatgtaatcaacagtctagttaattttttaattgccccaataaatccttaagctattttttcctggttgaggacacattcagtatcatgcattgggttcagttttcagttctttttagaattctttattgctgaacagtcgcattgcctttctttgtcatttctgaccttgccattttggaagagtacaagctagtttattttgtagaatgtcactcaatttgggttttcttattttctgcataaatagattcagattatgcatttttgtacattttcttatgtcttatttatcgcatcatgttaggatgcccatgatattcgtttgtttcaattttgacggcaacattgatcaccacctgaatattggttaagaaggtgtcaagattatggagtatccaacaaatttctccactataaagttatgtttctttctgtttataatgagtaagtaatttgaggagagatttttcttaaactacgtatacaacctatttctaatatccattttatctcctacctcttccatacgttttgtccaaaaaggacacatattcttagcccatttgacagatgagtgaacagaaacaaaaggaaatgcctcataaatgttagaactcaatcactgcattcatgtttcaagttcattatgtgacaattaacttcctcaactcatgttcttacaaaatcctggtcacctgcttaatttcttaagcacagagtatatttagaacaactgtgaaatcatagaaaaacctggaaaaaaaacttgactctgtcacttttgagctaggtaatctttggtaaggtttaaaaattcttaatctcagcttctttctctgtaaaaggaagataatgatatccaactttcaattttgccttgagattaaatgagataatatgtttttcttcaggcattaacacaacatcttgaatcaatagatatatgttttttctctcttgatcctttcagtttttttttttttttaatgaatagtgtttgccaagctctatacacagaagatatacccatgcgaaaacccagcatttggttaaatggaaagggagatgacattcactggcaaagtaaagttttggaccttgtaggtatctggcagaagagatttttaatagaagaaacaagaagggcaagggcctcaagtggtcatgttcttgacacaagcaaagtagagtaaggaggtaaggatggctagagcagagtaagtgggctggaagtgaaaaggatgagatcagaggtggcttgggaccagattatacaggccagtgtcagagttgaagttttattctaagggaggtaaaagatgttgtaggttttgagacagaggagtgatttgtgcttacttacattttaaatgtatttctgttgtgagcggaattgtgtccccccaaaagatatgtacaagttctaacctctagtacctgtgaatgtgaacttatttggaaatagagtctttgcagatgttcccaagttatgatgaggtcatgctagattagaaaggggcccattgcaatgtaactggcatccttgtaagaagagggaaatttggacacagacagaagaaagccatgtaaggaaggactcagaaattggagtgacacatctacagtagaagcaacattgatgattgccagcaaccattagaagctagaagagccaagaaaggattcttccttagaaccttcagagggaccagggccccacctgcatgattctggacttttagactgtggaactgtgagggaatgcatttttgttgttttgagtcaccagtttgcactcatttggaaattaactgcttcataaagtgatgtgaagattgtggagaacacgtgtgcgagcaagaggccactacatttatagacaagagacaatgacgtggacagaggcaatagggatggagatacaaaacggggccagatcctagttgagttttgcaggtagagacaactgtctttgacatttaattcagtgacccaaaccagggaccctttccagagtgaaagaggctgctattaacaaaaacacagggatgacagacgtagtctaaggtgtataatcagtgcattgactaactgaatataaaaacagaaaagatagagaggagtcaacaatgttgccaagattttgcctgaactactgaatgaacatagttaaccatttatgagatgaggaagatcataggaagaacaggtgtagtggaaaaattataaattgggtgtggggtttgttaaaatttgagatgtctactagaaacagtaagtaaaggagccagagcccacagggaaaagttaagtgcgaatatataaatgtagcttgtgacttaataatggtatttaaatcccagagacggtatgagacctagaaacccagagtatgaaaagtagagacagtaatgagtccttccatattctcctaataattaccaattgccaaagagtggtcagtacttgtgctcatatttgttgattatttgaagatgaaaacataaattgtgttaactgaatcacacctttgaaatagggagaaatcaatttattaagtcagtaatgcagcatgttacagtaccgaggaattattccagttatgtgttacacatgaggattgctgcacctcagtccatggattctgcttccattgctatggggtgaggtccagaattctcactttgtaaaaagcaagagaagaaattccgacatagcgactttgtagacccttatttgataaatctctctggttaagctttttcttgtagtattcacacgcaattcatgtgttttctacatgcaagttttgtgtatcttaaaccgctaaaacgatagcagctgtctggatcctgagaacagactcaggatgacagatatgtgtggaaatgatgtcagtctttctgagtttgtaaatttattttgaacagaaaagctacagttcaacagatgaatggagcagagttgggtgaaaagagttaaaaagataagacccaccttctccccagctgtgctcagcatcaggcattcctcctattcattctgcacactttgaaagcagcttagaactacccagcctggaaccctcaaagccgtgtctctcattttgatctcctttctccatctgcttcttgtacctttttgagatgtgttcactatattttacctagagctctaggaactccagactgatgactaatcagaaaggcagcacgactccccctaagctctgcctatctgtaattggctctttttacattaatataaatcccagggaaaatatattggcaatgctactgcagagtatctacaacttcaattactttaaaatgctcttaatactcccaattagctaattagagtctgtgtgttattgaggaatgttagaggttaaaataccttttaaactttggaggtaccagcaaaaatgaaagcatttctgattagagtctagaattgtgctttccttcttataataataattgtaggagtagcattttttgaaaagaaaaaaaattaaagacagaaggaaagttaaagaaaacgagaaaaaggtgcctttttcacacatttttaaaatttgcataattttattaaaaaaatcaaactaagatatttttgttttgttaatatttaaataagcctcatccaaaattctgctagcatttattattaataattgacaggaaatttttggcttttctgaaaaagggaaaagacacccatgcctgtgtcttctgaggagtctcagtcaggaaatccccaaagaaagaaaacattcccttgattactcttattttgtcttaattgcacatgaagtcagaagccttaactcatttttttattcattcatccatttataagtgagcatctaatatgcatctggtactagttgacagatagtggaaacagatatggtccatgccctcatcatcacattctactttagttactttcatgggatcatcatgttttaactatttcagaaagacaaagggctggaagatggagtttaggatttgtgaaaaacaatcggcatccgctgtacgatttcttttcagacttttcagtttccttctcagctttttaaaaaagatgtagatcgatagatagattattgatagatagagatactattgtcataactttccaaagaaaaatatactttaaataactttttatttggcaatacttttaagagttacaataagttgccaaagatagtacagagttcctccagcttccccaaatgatagcatttttatagaactatagtatattatcagaagttgaaatttacatgctatattactactaattctaattcagattttattttagattcatcaaagttttcatgcactttgtgcgtgtatatagttctatgatattttgttacgtatgaagattcataaccatcaccataatcaggatgcagaactgatctgtttccaaacagatattccttcatgctataccccatcccatatccttttccccagaggctacgaatgttctctaccgttacaattttgtcactttgagataatgttatataaatggagtcatacagtatgtaaccacttgctaccggcctttagaaaattacttagcataattcccctgagatgcatcccatgtgttgcaagcattgatagttttctttcttttttatcactgagagggatatgattggataaatatacagcatcagaatttgtatattcattcattcaatgaaggacatttgtgatgtttccagcttttttgttattacaaataaagttcctataaacttagtgtataggattttgtgttaacacaaattttcatttatctggaataaatgttcaggaatgctatttttgggtcattaagtatctgattgattttataggaaactactaacttcttttccagagtaattgtatcatcttacattctcagcagcaacatagaagagatcctgggctctggagctctcggatctggtgttgccagtatatatatttttaattttagctatattagtaggactgcagagtgtcttgtttttggattgatttgcatgtttaataactaataatgtggatttttttcttgtgcttatgtgctactcatatatcatctttggtgaagtgtctgctcaagtttgttgcccattctctaattggattgcttgttttcttactgtttagagagttctttttatattaggcatgtgagtcatgtgtatctgatatttgcaaatatgtgatttgcgagtattttctcccagtatttggcttttattttcatgcttgtaagaaggtcttttgtatggaagaagttttacattttgatgtccaatatattaattttccctttcatggatcatgacattagtttcttatataagaactctttgcctaatcctaggtcatgagaactttttcctatgtttttctctaaaagtttgataattttatcgtttatatttagatctatgagccattcaagtcaattatttcatagatgagttttagattatttttatgcctataaatgtccaattattcaagcatcatttgttgaaaagactatccttcctctattgaattgcttttgcacctttgtcaagactcatccttgtgtggaactgtttctgagttctccattctgttccattgatttatatatttattcttttactaatacaatattcctgattactgaacctataaaggaagtcttcaaaatcaagtaatgtgattctcctacttaattcttactttacacaattgctgttgctagtctaattcctttgcctttccgtgatctttagaatcagcttatctgtatctacaagtaaacatgttaaacctatacctcaatttaggaagaattggcatctttactaggtagagtattccattctggaaacacagaaaatctttccatttatttccttgtctttattgatttatttcatttttacgtagttttcactatatagaacttggaacagtttgtcagttttataatactttttttcttctaggagtgattgcaattggtaacaatgttttagcatcaaaatacacacacacaggcatgcccgcatgcacacacacacacacaaaactctgaaaaaatatataatttttcttttcacatttcgcagacaaatgtcggtaagtgtttgcaatcaactgttctagacacagctcttaatatacaaaaagttgaatctctttcactaatccaaaatagaatcagatacatagtagacattataaatttgctgaaagagtgaataaatacactgaaacattttaaatactttaactgcttctcaattgatgtgtacatttgcacatattacacacaaaaaataatacccacaaaggcacatatatatttgagtcatcctcagaatttctccacagggtaaggcctacccgaaggaaggcttatcctatttttcaggaaagcatatattttaggctgaaaatactctaaaatttgaagttcaataaaggcctaaaatacaactctcttcttcactgatgctgattgcctgtgtggtgtgcattctgtgagacatagcagaagttgaagagatatttgttaaataattaatgaaatgggctgggcatggtggctcacacccgtaatcccagcactttgggaggctgaggagggcagatcatttgaggccaggagttcgagaccagcctggccaacaaggcaaaacctcgtctctactaaaaatacaaaaatgagccaggcgtggtggcccatgcctgtaatcccagctacttgggaggctgaggcatgaaaatcgcttgaacccaggaggcagaggttgcagctagccgagatcacaccactgcacttcagcctgggcgacaaagcgagactccgtctcaaaaaaaataaaaaataaaagaaaaatgtgagaccgagggactaaaaattaagataataaaaatatatgacctttaactgtaacatatggttgatattattccaatattctcagtacctagtgatatggtttctgcttgtcaagtttgcatcatgctatatttagtacttttaaatcagttttcttaattgataagtatacataagcattttctagatcattgaaagttatttctgatataatattaagtcagtaatatccctttctatatcatattatgatatgaacattcttccattgaaaaatatttttatcacttaacatgtatgttgctttctaattttttcacatgtgtaattattacatatatatttttcttatgtatttggttattttccttgtatggcttggaagaatagctataaaatacacgttttaaagtaaatgatacttaggcaaaatgtccctccagaaaaattttccaactgattttcccaagtagttttaagatgctcttcacactaaactgtagccaatactaagggattgttttttcctctttgatagttgaaaatgaagtttcatttttatttttatttctctagctgaaagaataaacatttccatatgagtttacttgccataagcatgtgaaattggtgttgtagtctgcatgtcgctttcatcccaatttcttcattcttgcttctaggagacgtatttgattggtgattgcatgaattctccttcccttccttctcaacctatttgtggttcatactagaacctactggattttaagatgggtgaaatggttataaatatcccatagaaaaatctctggagtctcccagggtggtggggactagccagtttttgtttttgtgtgtttgtttgtttgtttgttttaactgaacacatttagctttgctcatgggcacacagacaggctacattttccaacattccgtgccgttacatacagccaatagaatgtactcagacttgatacataccacttccatgcctgctctgtaaattttttctacgctttttttcttgctttttccttttgccagatgaatggagaggactccagaccgagaggccaagtgtactggatgcacggagcctggatttctgaacaactgcatggcaagcacttcctgaaggtgcacctaacaaggaatactgtggtaggttgtggactgaaggagaaagaaattttaactgtgttaagtcattgaaataggagttttttgcctaaccttacgcatccagtgatttatttaatgggttagactaagcagtcgcttcttggctcctgttgtcagggcttcttactctctaaaggaatgtatttcttcaaaatgttaagcagtctgtggttcttacattgcaagaaaaagcaaaaatgacaatgcccagcatgctccgcaaatgattttatatattaggttccaggcttaaagggtctgagttgatgtttgggttccctggctaggctaataatttagggacgtttcagatagttactctttaagtctttgttaaatattgtatatcagaggtgatgagaaatcatttttattaataaaattagaattcctcttccttgaagcttataataaaggatttattgtatgcactgaatacagtgtaagtattattatttattttttttatttttgtttttattttttttgagacggagtcttgctctgtcgcccaggctggagtgcagtggcgccatctcggctcactgcaagctccgcctcccggattcacaccattctcctgcctcaacctcccgagtagctgggactacagtcgcccaccatcacgccgggctaattttttgtatttttagtagagacgggttttcaccatgttagccaggatgatctcgatctcctgacctcgtgatccacccgcctcagtctcccaaagtgctgggattataggcgtgagccaccacgcctggcccagtgtaactattattattagaaaattattggaacctgtttttcgctttatagatttccatcactcattattcaattatgtgtattattcatactcactaaggacagatgtagcattgatatagttacaaagtcttgtttccactttcagttttctttctgggcatcatagagggaagacttgcccatgtttcagttgtgctgattttttcaaatttttgtgtgtgtaattttccaaatgagacaactttttgggaggcaaaagtaaaaaggtagaaaattttaataatttaataataatttaataataatattattaaaaaaatttaataataaaatgaataatgggatttattgtatgcactgaatacagtgtaactattattattttaaaatttatttattttaaaatttattattttaaaatttagtaaactctacaatgtcacatattatttggcttcagggtttcaactaattgtgattaatctttcaaagaaccttgggtggcttaaccaggattagtgcaaatcaagttataccacataacttgcatgtatgtttgcaaaattactcaatataataaggggtcagcatcacacatgattatgtacttcagtgggagtaggacattatactggttggggaaatagacctataagggcaagttgagtttgctggaaccaaatttcacatttattccactggtatactagcatcctgtatagattttcatctctggtggctgtgatgcctgcctgtatactttaccccaccaatctctttatctgctgtgactttcccccgaattcacgtatttaggatgccaccaagtgtgggccgcctctgctaccagaaaggtggcattggaggctctactcctaaaatgattgtagaaaaacagttatttaccttcaggaacatgggggtctattgcccctgctcatcttagaaacagactggtagttgcccatttctgggtgagatgagccttggagttggaccaggaatcacaaagggaatgagtcaggtagcctctcaccttccttcaaactaccaggttttctatttctcaatagcagagaatggttttatgtcaattggcaagtgtttttccttttatctgacaatcagtgggaagtttattttatgttctctgctttgtgcttcgttaaattcatttgttttttaatgaaatgtgtggagaagccacatccctgccagccatatgacatcttagaggggattctcccgcttggtcttaacatttgatgatcctgtataaaggatttctgaggcattcaaataattcagctcattaaagggggtagtgacctagtcagggaattcttttctgaaaccaagcacattgaagtggaaacgtgatgtagggattatccagaccagtcagcgtatctcacagaggagactgcaggcttctggatttttctggaattgctcctgtgaggtatgtatgtacgtatacggcaaaagtgttacttcttctctttcagggtttttgttgttattgtttttgttgttattgttggttgagcctgagaattaaattaagatcaacaaaagacaagcatacgaatttatttaatgcaggttttacatggcagtggggacttcataaggaaatgatgacctaaagaagcagttagggtcaaacacttagatactgaattgtagcaagagtaggaaactgtaaaaatgtgataaggaaaaggagcttgggttagggtaatacacagggtagagaagtgactaggaagataagggttagtttacaaggtttgtttgcacagatttctctctgcttcaacgtcacatacttgatgataagaatgttactctacttttagtatgtggagaacatctttcacatgggaacctcatctcctgcttttaaaaaacggaatgaagttcagagaaggtttctacaccttctggtttctctgtttttatttaggtgcatttaactcaaggcacctaaataaattctgtgatatatgtatcacagaaatatatatatttgtttccctcatatatatgaaatgtgtgtgtgtgttctgaattgtattgctttcatattttggattttgtgactgtttttattcctggaccttccattgtttatatgaagataagattttcttctcctcgagaggatagatcataaatgctatttaggagaggtaagaggaaagggagtgatgaaggcaagttagatggaggagggaggcagagaacatcttagtaagggaagaaagccaacaaatcgtacaggaacacgagggcagaagactactggggggtaggtatgtagtccacttgactagaaaatagtattaagtacataaaaaataagaaaattgatattaactgtggtcaaattatggaagaataaaatcatgatgactttaaaggaaccttaagtaaagcaaggaaaaataataattatagtgaagagcacaataaaggttaaatatattcttaatgagctcattgttggatcttttaaggccgaaaggatatgtgaaaataaatatggtagatgcaaagtgaatccagagaaagcattattatgggacatcatttctgaaactgagactattgagtataaagataatccccatttacgtggaagtggaaagaaaatagtacaattggagtaagatagagatatttgtttccatacttacatttcatgttaacacttcttgaaatgtgatgtataaagaaatgaatagcatctgattgcaatggaaaattggccatggagtggcaatgcagagggaagaatatattttgttgtaaataatgtaatttcaaaatttcaaggaatctatttataaacccttcatctcttttattaccccactacctgctacaccattaggatatcttttcaataaaaaataataataactctagagggtaattgagttaatatcaaatggaagtgcttcaagctgttaagaaaggcactctgcaacaccaatctattattactaatgattgcaataataatgataaagaactgcataggtagtgagtctgtgccttgtctttgaaagggaggagaaaggaaagagtcagggcgttaacattcccggtagcatgacagagtaggaaagtagctgctggtaggtgggcaatttttcctagtagctgaaatttacttcttgtattcttagacacagagaatcttcagtgacaattaacaaaaaagtagtgggaggaacccaaatgcccactaaatgtgaaagtttgagtgctgtgctgggacacactgtcagtgttagacaatgccattgtgacaatgggccttactttgcactcacttacatcacccatctgttggctgtattcaggattggaacaagagagtgagtgggcagacttctctctcttatttaaagcacgagcaatttgccattccgcatttatgatttaatgtgtgttttagggaaattgctccggtagaaaacaagaaagaggggaaggagagagtgaatcttggagatcgtcgatggtgtagcataaacagggagaagaactggtgaagatgttcagtctgaaggctggcccttcatacacatgctttttaaaagttgtgatataccttgacttataccaggatggaaaaataaaatagatagactttttttctgagcacaaatttatcatcttaaaacaattgaagtctggcacaaagatgactggttagtactggttcctttttccttacattatttgaatagtatctgtattgtgaactagaccaagctactcagatacaggtcctagagaatgtcattatcaagtccagtagaattctgatttccttttaaaatctacttaatcacttgccgtaagtgcctatttctgtgttcctctctggttcctcatcaaaccacatcctctttgaaagcaggggcatgtttgcctcagtatttatgatatctcacacagtgtctagcacatgtaagacaaaagaaaatatttaaaaggtgaaagaagaatttagagggatatttcagcacatagctcatattatgatgaggttgatggcatatagtagcatctaagatgacaacacaagtgattggtaccttgggaaccctgtgtgaaatctcatggttctcagaaaagccacactgtggccatataactatgtatgtgttgcaaggcaagaagagaggcagaaggcttcctatcaacaacatacagtggccagaggattccagacatccaagtattgttcagctgatttgtgtctatgcaatggccaggaccagccagaagaacatgatgaccttcgagtttgaatatttagaataaggcttaaacctatatcagggaaggtcaatttctccagtctgccatcggagagagttaaggattggacacatcagtttctaagaaacttggatgttcttactccaactacatcatccatgaagactgaaggcagaacacagactaatgaaaagttcctatcagcctggactgatggataaaaatgtaggttgacattctggtatcagactctttattttcctgtagactccatgcatagcctctctagataacagagtgatcttcccacagatatcttattgtgaagtctctcttctatgaaaactctttagcaaaggtgttgatgggatagttttccgtcataagatgtgatttctccttaatttaccttgcccgtaggcgctttctcctggggcgggggggctctactgtttgcagtggtggaggctcaggtggaaggctgaatcccagctgcttttacaagagctgacttttatctagaacaagagaatcactgtttttgagccccacaagactctaacttagagaaggaaaagagaagatgtgaaaaaaatgcagctaactagaagttaaaaggaaggggaaatgtgttttgagatctttgttgttgtttgtttgttttttgagatagagtgtcactctgtcacccagactggagtacagtggcatgatctcggctcactgcaacctccacctcctgggttcaaatgattctcatgcctcagcctccccagtagctgggattacaggcacccgccaccatgcctggctaatttttttatttttacttgtgacagggttttactgtgttggccaggctgttcttgaacccctaaccttaaatgatccacccgctttcacctcccaaagtgctgggattgcaggtgtgagccaccgcgcctgtcctaatatgtcttttaagtggagatttccccaggcaaaggagaatcaaatttcttatttctcttatcctgtgaggccatggagccttcttctttctacctacctctttttataaaatatattgcttccttaaatattcaactattaataatatggcaagagtacctcttatgcactaggaccattgcttcccacgtctccttagggaagcacaacttttctcctctctcagatattccacacaaaggggtatgtctacttctacttctccctccttcttccagccagatttgttagaagtgggtggtgagagaactgggctctgttttgtacaataacaaagaaactaaaggaaaagaatgaatgtatgaacaaataaatcctcagctatcatctactttttttttgtattcttcatagactaaataatgttcatttattcatccattcattcatcttttcagtaaaaaatgttgttgagtgtgtattatgaaaacatactgctcaaagggttggggatacgggcaagaggcttacttgcatgagcttccattctaaagggaagaaaaatatgccaaatatgtaaacaataaacaaggtggtcagggctgtttcctttgtcccctggaaaaggaagattctcccctatcttacctccagagatttattactgcctaaaccctataatcatccttctagacttattttagagaatactgttggttggttagtttgttttcactgcaaagcaaaagaatgaaccagaatataaataaatacatacatacatacatacagtagactctgtctcacctgcatttaggtgtggcccagtgagtaaattctgatcatcagggaatgggtcaaattgttttgtgcaacttagtgatcacaccttcaaggtgaaagtgttattttcttctgaggcctggaatacagacatagtggtgtaccgttttgggctatgtgcatggggataaaatcttatgaatgatgaagaaagaatatggaaaaagcctggctccctaacagggatcaccatatcatcttttgattgtttattcttctacaattacatgtgggagaaataaataggttcttgttcaagtcattattattttgggtccccaatatgcagctgaacataccctaactaacctatacactcctgccctgcatgactctaattcatggacctcttttcaatttctatgaaatcacaaaatattagaagtgaggaataccatagaatcactattcatggttttcaacaacggtacgcagaagtagtaactctgcagtgatcatgtagaaccaattttctctcatctccatatccacctgcattttgatgtacagctctccctcagtgtctatggggcatttgttcaagatccacttccaccctaaataccaaaattcatggatgctcaagtcctttatgtaaaatggcatagtctttgcatataacctacacacatcctcccgtatactttagatcatcactagattacttatacataatacaatgtaaatgctatgtaaataattgttacaatgtattttaagacttgtattatttttattgtttttttaattttttaaaaataaattcaatctgagattggttgaattcgtggatgtgaaatctgcagataatgaggaccaactatatataatttctgccaactctacatgcataagttatccatctgcttgtgtcactcctcttcttcacatcaaaaagctgtgcatgtaggaaataattgtgatcccccaaatcagtccaaagacacactgaagagcaccctagaaatgttggctaaggaaaacctgaatttgcggtacgcaactttgatgaatctaaaaacttggaaagataaatcaagatttatctttgattcttccacctcattctcaacataaaatccattagcaagtactcttgaatataacttcagatgtgttctgaatctatcttctgttctccgtctaaactattgacatcctagttcaagtcaccactgtctctatcatggacaacaacaattgtgtccggagtcatccacctgcttttctgttctttccttctctagtccctttccactaagctgcaataatcgatcttatggtaatttaaatttgattatgcaactttcctgcttaaaatcccctactggtttttcatctcacttgttgcacaactcaagcccccttgccatgacctataagccctatctatatgatccagcttctgccccactctcagccttatcccatacaacttactctctagatcactctgtccagtcatacggagtgtcgtactcttctttgagttctgtccagtcatacggagtgtcgtactcttctttgagttctgtccagtcatacggagtgtcgtactcttctttgagttctctccagtcatacggagtgtcgtactcttctttgagttcttcaagttcataaccatcctgcagactgagtttgctacagtttcttctgatttaaaattttttctctaggtcatcatatggctgcctccttacctttcagatctcagcttttctaagaagaaccttcactgactcttcaagtgccctcccagtcccagtcactatcacatctcctgttttatttttttcctagcaattatgctaacttacatgtttgttgtctgtcttttctgatgataaggtgacatctttggagtcaggcctatgcttatctcattcccaactatattcacagtatctagaggaaatcttacaacagaagaagtgctcagtaaatacatgttgaatttttaaagtgaatgagtggattaattaattaattaattaattaacgaacactaacctgagatagattcgcctgccagatccttaaatctgaagaaatttctgctatgtcatttgttggttaataaaccatgacaacaaccacaatcagttgtaaaacaaatcgaacaaaggtataaaacgaattaataatggaaagtattttagccaattgtactgcaaattaataaacaaaaaaatcaacaaatagatactaaagttcaataaccaccaattttatccaatttaattacttcttgcttcttctattataagacacttatttcctggactgagagccatcttcaactctatcagctactactggcttttctcaagtgacccattcagctgtctcttctacccacagtaatgctctccccagaattctaccatcatcggcttcagtagaaatatctgtgacacacagggctgcaattacagccatttgtctctcaacagtaaggagaacagctgtctttttacatggggcccccaacatttccaagatggtttcttttattcctctctggaaatgtgaatgccatctcaaacgcacgatagaagcagtgccgataaagtctactcttgtcagtctcacaaacagcctcattatttggtgactgcaaacatggtttgtagtcattgctcctgccaatctgaaggcttctaatgctgcagcggagtgattgaaagtccaagattacaggcgaaggggatgaggagttgtttatagctcttgctcatccactaaaagcccccagccagaagcagctctctgtttgaaggaaagtaagtttcttccacagctgaaaataaatgtgttttggggaaaacacagggcttgtgggggaggaagcatgccttgcaggcctgaggaaagcatggggggcagtgatgattactagcagtcgttcctccaccagggaggtctctgcatgacaaccgtcaaagttgggagcacgaatgtttagctgcctctcccattatgaggtggagttagttatgccattgcagaaacaaacctctccacattgagtcttgctgtaactggtaattgtattaatgtcatatttgatgatagagccctgttttagctgacaccatgcatcactggaagggaaggtgccgtgattccagttgaatatactacgttgtaaagaccttcgctaggcagcaggactgagggtgcccggggcaagtgccagcccatgccatcactctcacagagccccgggtatgcttgaccattgaaggccaggaggctaactgtctcctggacactggcgcagccttctcagtcttactgtcctgtcccaggcagctgtcctccagatctgtcactatccgaggggtcctaggacagccagtcactacaaacttctcccagccactaagttgtgactgggcaactttactcttttcacatgcttttctaattatgcctgaaagccccactcccttgttagggagagacattctagcaaaagcaggggccattatacacctgaacataggagaaggaacacctgtttgttgtcccctgcttaaggaaggaattaatcctgaagtctgggcaacagaaggacaatatggacgagcaaagaatgcccatcctgttcaagttaaactaaaggattctgcctcctttccctaccaaaggcaatacccccttagacctgaggcccaacaaggactccaaaagattgttaaggacctaaaagtgcaaggcctagtaaaaacatgcaatagcccctgcgatactccaattttaggagtacagaaacccaatggacagtggaggttggtgcaagatctcaggattatcgatgaggccattgtccctctatacccagctgtacctaacccttatactctgctttcccaaataccagaggaagcagagttgtttacagtcctggaccttaaggatgcctttttctgcatccctgtacatcctgagtctcaattcttgtttgcctttgaagatccttcaatcccaatgtctcaactcacctggactgttttaccccaagggttcagggatagtccccatctatttcaccatacattagcccaagacttgagccagttctcatacctggacactcttgtcctttggtacgtggatgatttacttttagcctcccgttgagaaaccaacaggagtgccatcaagccacccaagtgctcttaaatgtcctcgctacctgtggctacaaggtttccaaacaaaaggctcagctctgctcacagcaggttaaatacttaggggtaaaattatccaaagggaccagggccctcagtgaggaacatatccagtctttactggcttatccttatcccaaaaccctaaagcaactaagagattccttggcataacaggtttctgccgagtatggattcccaggtacggtgaaatagccagaccattatatacactaattaaggaaactcagaaagccaatacccatttattaagatggacacctgaagcagaagtggctttccaggccctaaagaaggccctaacccaagccccagtgttaagcttgccaacggggcaagagttttctttatatgtcacagaaaaaacaggaatagctctagaagtccttacacaggtctgagggatgagcttgcaacccacggcatacctgagtaaggcaattgatgtaatggcaaagggttggcctcattgtttacgggtagtggcggcagtagcagtcttagtatctgaagcagttaaaataatacagggaagagatcttactgtgtggacttctcatgatgtgaactgcatactcactgctaaaggagacttgtggctgtcagacaaccatttatttaaatatcaggctctattacttgaagggctagtgctgtgactgcacacttgtgcaactcttaacccagccacatttcttccagacaatgaagaacagatagaacataactgtcaacaagtaattgctcaaacctacgccactcgaggggaccttctagaggttcccttgactgatcccaacctcagcttgtatactgatggaagttcttttgtagaaaaaggacttcaaaaaggggggtatgcagtggtcagtgataatggaatacttgaaagaaatcccctcactccaggaactagtgctcagctggtggaactaatagccctccctcgggcactagaattaggagaaggaaaaagggtaaatatatatacagactctaagtatgcttacttagtcctccatgcccatgcaacaatatggagagaaagggaattcctaacttccaaaggaacacttatcaaacatcaggaagccattaggaaattattactgtctgtacagaaacctaaagaggtggcagtcttacactgccagggccatcagaaaggaaaggaaagggaaatagacgggaacccctaccttcactgcccacatccatatagcccacaactgctataactctgccactctttgcatgcatgcaaatactcattattggacagggaaaatgattaatcctagttgtcctggaggacttggagccactgtctgttggacttacttcacccatactggtatgtctgatgggggtggagttcaagatcaggcaagagaaaaacacataaaggaagtaatctcccgactgacccaggtacatagcacccctggctcctacaaaggactagatctctcaaaactacatgaaaccctccatacctatattcacctggtcagcctatttaataccaccctcactgggctccatgaggtctcggcccaaaacgctactaactgttggatgttcctccccctgtacttcaggccatacatttcaatccttgtacctgaacaatggaacaacttcagcacagaaataaacaccacttccattttaataggacctcttgtttccaatctggaaataacccatacctcaaacctcacctgtgtaaaatttagcaatactatagacacacccaactcccaatgcatcaggtgggtaagtcatcccacacgaatagtctgcctaccctcaggaatattttttgtctgtggtacctcagcctatcgttgtttcaagggctcatcagaatctatatgcttcctctcattcttagtgccccctatgaccatctacactgaacaggatttatacaatcatgtcgtacctaagccccgcaacaaaagagtacccattcttacttttgttgtgggagcaggagggttaggcggattaggtactggcattggcggtatcacaacctctactcagttctactacaaactatctcaagaactaaatggtgacatggaatgggttgctgactccctagtcaccttgcaagatcaacttaactccctagtagcagtagttcttcaaaatcgaagagctttagacttgctaaccgccaaaagagggggaacctgtctatttttaggggaagaatgctgttattatgttaatcaatccggaatcgtcacagagaaagttaaagaaattagagatcaaatacaacgcagagcagaggagcttcaaaacaccggaccctggggccttgtcagccaatggatgccctggattctccccttcttaggacctctagcagctataatattgttattcctctttggaccctgtatctttaacctccttgttaagtttgtctcttccaaaattgaagctgtaaagctacaaatcattcttcaaatggagccccagatgcagtccatgactaaatctaccacggacccctggaccagcctgctagcccatgctctgatgttaatgacatcaaaggcacccctcctgaggaaatctcaactgcacaacacctactatgccccaattcagcaggaagcagttagagcggtcatcagccaacctccccaatagcacttgggttttcctgttgagagggggcactgagagacaggactagctggatttcctaggccgactaagaatccctaagcctagctgggaaggtgaccgcttccacctttaaacacggggcctgcaacttagctcacacccgaccaatcagatagtagagagagctcactaaaatgctaattaggcaaaaactggaggtaaagaaatagccaatcatctattgcctgagagcacagaaggtgggacaatggtccggatataaacccaggcattcgagctggcaagggctaccctccttgggtcccctccctttctatgggagctatgtcttcactctattaaatcttgcaaccgcaagacaaaaacaaaaacaaacaaacaaaaaaaaaccctagctaggttactaaagcctcttgaccctggtttgttttaaacaccaaactattcttgaattatagtttcagatgaaaagaagaaaacagaacaaatgtcctcagttctgtatttctctctttctcaatattaagcatacacacatattcatttgttcagctattagaaattatgaattgaatactttctgtgcaccacatccatgtttgctgatggttatacaaaacagcaagagtaattctatggcataatccctgcgctttgcttcctcagatttccatggggaaaagcaactaatcataatggaatgtgatgagtcctataatgtaagtaaatgtctaggttttgaaagaccagcagttgcagtgatttgttgcactcttaactttggagaggttatgacaaaagtagaaaccacagaagtaagtagaatggattttccaggtttagatacaggatggagaaattgaacaagtggttttatgaaagaaagaaagagagagagaaagagagagagaaaaggaagaaagaaagaaaagaaagaaagaaagaaagaaagaaagaaagaaagaaagaaagaaagaaagaaagaaagagaaagaaagaaagaagaaaagaaaaggaaagaaaagaaaagaaaaagaaaagacaagacctttagagattattaactctgagagtggaaatgtggacaaactctttgaggagtatagtgaaatttataaacattgtcccccaagaaagcaatgcacataaacaaacaacacagttttgaatgcagttccatgaattcatcacagagcagctgcaagtttgtaatacaggaaaactttagtctgaatttcctttgcttccttgcatctttaaagcagtgtttctcagggtaaaggctttaagctaactatattagaaacatctgagctgtttgcttaaaattcagatttcaggcctatctcacactcttcattgtaacaactgtgtgattctcattcagtgaagtctttcaaagctcccaaggaattctggtgcccacactctaaaacccggtgtatttcacacttatttggactcactgcaaacctctcaccccggcttttaaactcaggagttgcacagttgcgtctgctgagaggcctggagaacctccctcacagaaaattacgtagttagaaaatcccaattctcattcccccttaaaagatacatgcattaaatttcagcttgtgataggaagctgtctttctgcctacctgcttcccatgggtttgtcttatctgctcaaaaaaattgaaatctcttggcctgttgagccataactccccattttgcatctctcaggtggctgggcacatggtatatgctaatgagtgttttttagttggctatagagtgagtgtttttgcttccttttcctttaatacagctagctagcctctgtcattccatcaggatccaaatggtttttatttgtccttttttgcattttgtgttaggatggtcttgtcacactcctgtgtctgcaatcacctggtttattttattaaggaatgttttgttagatttattctcagctcctctgttctctccactacctcctcacagtcctttcacagaaagccctttgtgttgagcaaacagaccctaatctgcacatctccctccaaactccaacagggctgccaggtgagcatctcaacaccagctggaacagctgtttgagtggtcctgtgcagcaggcagtgactgtgtgtgcagttctcttgtctgatgggccctgggtccagcacgctcagggaggaagccacaagtgcaaatgtttgctaaccggctggaattcctaaaagcagctgcctgctgattgataactcgcataatgacaccaagtgttcaaacactgccaagcaggaatgagaccctgtgagctcccctatgcaatcccttgctagttggccaaatccttatcttccagtatgcaggcaacaaagacagcaagagccagaaggtatctgatccaaggatgcctgttacaacattgattttaacacataggatgggtgaggaagtggcttgatgctttccacttgtaaaatttttaagaaaattatacacaggggctcagcacaaacatggagcctatgtactggaatatcaagatcaaatgtattggtatttttatgctttatggataacaatggactttgatatgaaactagtagaactggcttctagaaaatatttgttaaagagactttctctcttctaatgatcctaagattgtaaggaagccacaacatttctgtgcattactttgccacagaatttggcccaatggtataaaaataaaccttttaaataaagatacatggtctttgaaattaaaatggcctgccaaagtggttgagaatggcagtctacaaacaaagattagcaatatgcaatattttgcattgatatgtctcaagtcactctatttcatctgtgttcattgctaccaatttagttgaaacacatgccacttctgtggtcacccttttcaatggagcttaactgactgacttccctactctcatattgtattatattctccacacagtagtgagattttccaaagtcataatgaatcaggtcactcttcttattaactttcttgggttgcatttgagagaaatgcccaaactctctgttacagaagagagagagttcagcatgaccccacttctctccaaatgcagataaaactactcaaaaagggttccacaagcttcagcatggctaggtttctgtctgcatattatcaaattaaataacagagattttctaaaagaaaatacatttatgttgggaatagaggattgcaatgtggatatgtgtgccatagtaaactatgtgcttattcaaggaggtaaaggatgacaaaggtttaaaaaaaaaataaaaataaggaagagtacataattgttttgaaataattatccttgttgacaaaggccaacaaacaaccccatcaaaaagtgggcaaaggatatgaacagacagttctcaaaagaagacatttatgcagccaacaaacatgaagaaaagctgatcatcactagtcattagagaaatgcaaatcaaaaccacaatgcgataccatctcatgccagttagaatggtgatcagtaaaaagtcaggaaacaacagatgctggagaggatgtggagaaataggaatgcttttacaccgttggtgggagtgtaaattagttcaaccattgtggaagacagtgtggcgattcctcaaggatctagaaccagaaataccatttgacccagcaatcccattaatgggtatatactcaaaggattataaataattctactataaagacacatgcacgcatatgtttattgcggcactattcacagtagcaaagacttggaaccaacccaaatgtccattaatgatagactggattaagaaaatgtggcacatatacaccatggaatactatgcagccataaaaaaggatgagttcatgtcctttgcagggacatggacaaagctggaaatcattatcagcaaactaacacaagaacagaaaaccaaacactgcatgttctcactcataagtgggaattgaacaatgagaacacatggacacaaggaggggaacatcagataccagggcctgttagaggggtggggggctagggtagggatagcattaggataaatacctaatgtagatgatgggttgatgggtgcagcaaaccaccatggcacgtgtaaacctgtgtaacaaaccttcacattctgcacatgtgtcccagaacttaaagtataattaaaaaaaaaaaaaaagatttttagcgaaatagcattgtgaggcttattttaatgcagatttaaaaaaacttgcctgaatgtttgaaacatggaatatgtttaataaatggtcgatattatgatgggtagacagttgatgatggcactgattaaaagacaggtaagaaaaaagtacagatagtcaagctctagaataaaaaatataatatgtacagttcagaactcagtacagaaaacatattgttttacctttggttttgattttcattttcaaatatcagcaattgggctattaaattcactttcttatagaggcatagcacaagctgattaaatatatttagtagttgtggtctcaggagttgatttaaagtagtgaaatatacacgatttaaaatgtttggtgtccagacagcatttaaatcctcagaccaattaagtttaattattgagtgagtggtaatacttttcttcaacaatgtgaaggttaaattaaaattcgttttcaaactagcaggtaacacctactaattgtcaatcagtcaaatgtttatttgaggaactgcttgaaaaaaatagagattaaaaatattagcttgaagctaatcttctctaatattataagcattatacttggattctgcaaagatctttcttctttaaccagtactgtggccaatctaaaacagacctttctgaaacttgtaaataaggtctagcaaaggtttcaaaaatatgtgaattggaggtaactcatagacttgaaattccagaaacctcccgtccatagctgggtgactgacaagaatctcactattctctctcactatattaaaaatgcagaatgatttctcctgcttgacaagagcttttgtggggcattacaaaaggtaaacacatagataagcacacagctacacagataaatggaggggaaaaaccttacaatggcattcaacaaagaaaatcatcttgttgggtataaaaattactgagtaaacagacacagagaacaatatatgaagaacattttaagcttcacccatagtcctacaaaaacacatgcactgagctaaaactttgcttacgggggtaccgatgaagtgaaaggtgctgtgcactatggaaataaagatgccagaaatatttgagaataactccattttctgatgatcgctaattagggagtaggctcaattggatactcaattatattttttaatgaaggtatgcaacaaattacaaagaataatgtaacatttacttgtgaaacttaccatcctacttcattacccacatagttagagttctcttgaaatgtcttgcccaatcaaccttctccctgctctctccctgcttaagaatcagcatagtgcttctgagatttattagtgctgatatgtatcagtttaatgcaaacaatctacaactttattttaaagaaaaataactatatggctgtacttctagtctatacactcctgagtgtgccaaagtgtttcatttattgtagtttatataaacataacaaatttgagaaatgcatacaattcttcccattaaattttttcacagttgggaaaaaatgagccttagagaatataaacaacttgccaaggtcatattctacaacatcaagctcatataaagtgcaaatatgcaagaatacactcagttttagaggataattgcatgctatttcattagccataaaatacactatttctttagaaaacagaatgatcaattaaggtagttgaatagtagagatttctactgcataacactgaattttttaagtttgaaaaattagaaaggctgtgttatatgttacacataagaactccatcatagcaatgttactgaccacagtgaagtggagaatagagaatattacttgactattttgtactatgaagtattcattttatggttcttatgtattctagcccataattacgtagaattgtttaccattcaaaaatatgtattttgacacaaaggaatatggcgtagcaactcctattcccaaatatatcccactattaaattatgatggtggctttctgtgtttatgtaattgacttttactcacagatgcctcaactgtgtatgttaagatgttttaaaatcaataaaggcaatgtaagaagtcaccagttgttggcaaacaaaatgaaaatgataaattcttgtaagtcataatttttgacagattgtaaaaaaattgtatactagttgtgttaatattgtcttctgacttaattttccctacactacctgccccccacctacccggcctacaaaaacaaagttttagggtggactttattacaaagatgcatcgatgtctaccaaactatatatccataaatcattcctacctgcatacataagtttataaaatgtgaacatgcatatgttcataacctatgtaatttcaccacatcttctgtaaactatcagtcccctttccagtgaggtcaaacaaaatgtatgttcaaagtacatatgaaattactattcttcattaaaatgtaaaacattgattttacattcaggtggatactcttcttctgaaggaaatttcaaaaaaagtctcaaaaataaggaaaaagaggacatgagttcgttttcttgttatgaaatcatacttaccacaccataactttcaaacaatgtccccactttcagaatcacaattcagggtactaaatggacaccaaaagatgagtactaaaataacaagtccttttgaatttctctacccattcaccatccttgtcaatttttcggtgcttaaaattctattatttaacattcttgtttttgtttaaagagtattttgtatctggatgcctctggacttgaagaggttgatagaggtagtaaggagaacacaattcttagcaaagcatctagacatattaagatgtctacacaaggatcttaaattgtaagtgtgtttcttttgacgaaaaatatattacctcaaagtagagctgtgtttctcagccttggcactattgacattttagaatatattacataattatatacataatatatattatagatttttttttaattttgggggactatcctgtacatcgtggtgtgtctagcagccactctggtctctacctactagacgccagtagcaaactctcccttgagtctcctactcctacatggccagaaagttgtgacaactaaaaaacctccccagacattgtccattgttcactggagacagatagctcctggagggcaattctcccccattgagatcgctgaagtagagtcttgataggaaacaaggaagcacttcctcactagaatttaagcatctggtgggcaggaggtttatattgttcaaatcataaacccagcatttagaacagtgccttccatatagcaggtaactgataaatatttgccaaaataagtgaatgagtaaaatgtccaaaacaaatgatgtttcgatcataaaatagggtacactgttaaaaagtacatatttttaatgtatttattatgtttactaatatgactagattctcagaaaatatgaagcagaaaaagctaaatacaaaaagcatgtctaatttattcccattttgtggtagtaaaaatatatatatcttgaaatatatgcaaaaattgtggctgtactaggtagcagaattgcatactatttttatattctgcttaagttcatttatactttattatgtgcaatgttttattatgcaaaatttagttgttagtttacagaagatatactaaagaacagagtagttccagtacaacaagaaaatcctttcctaattccacattctgcatatcgatgagttctaaacatcctggactgctgacccaaaagggttccctgagaaaactcctctagatgatgcccctgattctaaaaattcttgtctatgttctcagaagtgtcctcagtactatggagacctggggaaaaaatagttcagagtcccagtgatgaacaagtttaaaatctaattgggaacatgagacctatacacatgaatctgtgaaaacaacatgagaaaggatgtaatgagatgttaaattttgtgttgttaactctgctttaggactttatgcaagagaggtaccaaggaattagtgcacttgggtagatgggatttgtgctgaatcatcaaggttgaatgagactcaggtaaaaaaaaaaaaaaaaaagattggaaagggcatccccaaaagggataaaagacaaacaaatatggtgagtaaaggcacaaagagaaaaggtgaagacaggtagaaggcatcaaagatgctgatctcattagaacaaagcggtaaagacaacttatcaacagaggtgcaactagcacataggaaggactagtctgtattaagtagcaatgctctagggcatgaacaaacttttcatacctttatccccctgcaccaaatggcagaagaaccagtcttccttcagcaaaggcaattttacacagtctcccttcaggatatcgggcaccagtaatttttacaagtttactctgtttctcaatgaccctgaataacatccagcttttatcatgaggaaccaccctatatactcccaagtgttactaggattgggtgatagggttatactgccccagttgaaaactgccaagtccctaggatctattgtctgatgtttcgggctggatctgcatttctttcactttccactcaatttcttgtgatttctgagcaaggtgtgagcttcattgtggggtgtggggcagactctgcagtcaaacagtttgaattggaatctaggttcccccagttgtgggatgcataaatttaggcaggttattctatacatctaagtcttagttttcccatctataagataaggcaacatactaagaactccatctcttacaaccaaagagaggggttttggtgaatggatgtgttctgggttgaattgtgtccccctaaaaatatatgttgaagtcctaaccctgagtacctacgaatgtgactttatttggaaataggatctttgcagatagatataatcaagttgaagggaagtcatactggattaggatgggccctaattcaacataactgctgtcattataagaaaaaggaaatttgaacacagaggcacacaggaaggatgccacataacaaaggcagagactggacttatgcagcagcaaaccaaggaacaccagagactgccagcaaaccaccagaaactagaaagaggcaggcaaggattacctacagctttcagaaggatcatggatctgacgctgattttagacttctaacctctagaagtgctggacaataagtttctgttgttttcaaccacacagtttggggtacattgttacagcaaccctagaaaactaatacagaatacgttttaaaacctggtgaaatctgagtaagataaatagtctaactgatttcaatgtgctaattaataaaatgcactccagttatgtaacatatcatcattgggggaagctgagtgataagtaccaagacttctttgtcctacttctgtacctgtgtgtgagtctacaattatttcaaagtaaaaagttaaaaaaaataggactactaagaaacatcaataagataatgcatgtaaattattttatttattaaactactcaaccaatattgctggtattaattttagaatcagtagatttttagccataccagagaatccaaaggcttggtgttttagaatcataagaaatactgattatgaaactactgtaaattatttggccttttttgactttcggatataagaaacagcatatggcaacagatgctgtgcacctagctaacaatcaatgaactgcaaattttccacttggtatcatctatccagctctcatgaagttgacctcccagctacagctcacacagttgattctttgtgggtccatgacttttttggaccttgcttggtgaggttaagaatttgcatatatttctcctggctttccctgatggtgatttgtttttctgtttcaatcacattgagtgggcagtgataaaaccagtacagaaggccagtgtagccatgtctacaagttgacgtcctcactcataagaaaacgtgcaggtcttatgtctcatagttatatgtgtcgattgaaaattatggtgtccaccttgtatgggaatgtctgaaacagtgtgtggagttatgatataatcttgacattttagaaaaataatactttcagcattaagctactttctactaggtattcacttttgatttgagtacttctttagttacagccaatgttctgtcttttactggtggaatatctgctagccatgctatagggaatgaagaacagctcttagcagaatagagcaggcagggaagtggcagtccacccagtgccccaggttttttcattcatccattcatagaaacaaagaatacgtattaagcatgttttatgtgccaagcattagaactgagttagcaccgagaataaggcaaagtagccattctcatgatgcttatatgcacaggttggggaaacagataataaacaaataagcaaataggtaagtgatcattttagatattaattgacatttaaaaagtaaaaacagtaaagtgatgtttaatggaaaaataatgagtagggtaaaggtggggtcacaggagagactcaacggggaggtgacttttgggctgagacctgggtgaggaggaatcagccacactgaaaccaatgccaaatgtgccaagcaggagaaacagaaactgccaggggacctggggcactttggaggacaaagagaaggccgttgtgactcaaatccaaggggcaaaaggcaaagttaattgtgactaagtcagagttagtggagaaggagattacacaaagcctaggaggtgattgactgaagttggatttgattctcatgcaatcaaaggcttttggatagttttaaaatgaaagaagggaataaaagatcctgaagagaaggaaaaacatggagattccaaggagagtactcttttctagggagatttcagcttatgatttctataaataaaataggtttcaagcaattcagttgtctgcttggctcttacatatatcacttatgaagatcctgaagtgcggtgattaagaaaacagaatcttaacctattcaatgaccaggtattaacctaaactttacaggaatgtgatattggtcaagttagcttatatttaggcttcagttccctactccttaaaattgagtcctccctaagatatgccattaacccagagcttagaacctcataatcacatattaaatgttagtgattttgataatgctaccatcatcataaccaacaacctgacagaatctattagagctttgtacatagtacttgcaagacctgttattttgggggtagggaccatatttatcttttaatcactgtttttcccaatgcttggcaaagttatttgcacattgtagacactccataaatatttgttaaataattaatgaaaagaggaaagcagatgctcagaaaatgtttaatgaattacttagctgaatcctttacctgttgattaccagttatctgtagctcatgggtgctgtttctctgtatttattcccatttagatggcaatcttttaaagttccttggaatgaaaccataatttcttgcatcaattttgaacattctatgaatgagaaggcttagggtaaaagggaggttgaggcttgtcaaatatagattttgtatctatctgggtgagacagtatctttttgatagaatgcatctacttgtacagaactatgactgagttgtgtaaaatacccatactatacatatttcatgttatctataagccaaggctccaaaatgaaaaatgaaggttgggctgtcaaactcagcatttgggcagatattttgatacaaaatctgtctacaatgagaattaatgtacccagagtgaggaagatgtggcaaccgtccaaagaaatcttctaaaagaaaggtcacatccagtagaggtgtttatttaagggttagaaaaagagagatgtacattactcaccaatgttgcatacatagtcggtatccattaaatcttgctgaatagtccaaactatgaacatcagcggtagagaaattcaaagaactttggtgacaaagataataaagaaaagtattatgttgtgttacaacaagtatgtttaagagataagacattttgaaatcaggctatttgatttgcagctgtatttctttgagcaaaatacttactcattctgaatgaagtcttagagtgaacatgtctcaaataacctaataagtcttaccttgtaaggctgttatcagtattgcattagataatgtgtaatataagcacacagcaagtattccacctacattggttgttgtttctgctattgttatcatatttattgtgaaatgtttagcagtttagtcataaacgtgatattccacacagaagagtggataagagatttctaatttcaatcatgacaaaatagtgggtagcatttatcagaattatccttccacctgatagaaccataaaactaaataaaatatgtgaatcaataaatctcatttatctcattaacaaaaaagtgggaaaatcatataatcatcacaatagataaagtacaacagaattggagacttcctcaatctgcaagatttcctgatgaaaatccaagaaaaacatacagatatcatcatacctagttgtgaaagattgaacaagtttcctctaacactgggtacaatgcataaatgtctcttctcagtacttgtgtttgtcattgtaccgagcactagccagttagataaagtcaaaataaatacatgcataaatacataaaaagtgaataaatgtaaaaaataaaagctataaaaactcaaaaaataagtaaaaatattatttgcagatgacgtaatttttatgtggacatttctaagactactaagtctaataatgggatttaacaagattgcaagattcaatgtcaatatacaaaaaagtatgtttatatatttgtgaaaagttggaaaaataccaatgacaatagcttcaatacacataagataattagggataaattttatgaaggacgtacaaaatctctatactgaaaactataaagtattgctgaaaaaagtgagttaaataaatagatgtagcaaaggcttgggttgaactcgacattatgatattaattctctcaaaaaagaatactaattgtctctaaattcatctatagattcaccaaaatcttaattataattccagcaaatgtttgttgttgttgttgtttctgttaatttgacaaatggattccaaaatttacatagaaattcaaaatacctagaccttaacctagacctgaactacacaatcttttaaaaagatagcaaagacttttccttacctgatttcaagactcaccataatgctacattagtcaagctagtgcagttgtggcacaaagctggacaaatgaattcatagctctgaatagagagtccagaaatagacacatatgcatatggtcaattgatttgttggcaaagatgccaaaacatttcaataaagaaaagaaagtttattcacaagagaatgctggaacaattggataaccgcatagaacaaaagatgaaactcaatgcctacctaactttcaatgcaaaaatctaagccaagataaatatatacctaaatgtaggagctaaaactgtaaagctttctaaactaatgcataagaaaatatccttatggctataagttaggcaaagatttcttataactcaggaacattgatcatacaagaaacaataaatttgacttctgttcattagatattatcaagaaaattaatatgtatgcatggagaaaaaatccagaatacataaagaaatcttatgatggtaataaaaagataaactaataataaatgcaataatccatatttcacaaggaagataagcagaatggccaatacacacacacacacacacacacacacacacacacacacacacacaatcaacatcattagtcattggggaaatgcaaattaaagctgtattgagaaaccactgcatacatactagaatggcttaaattacaacacatatgcaggcacgcacacacatataccccaaatgttgacaagggtatgtagcaccaaaactctcatacacagctggaaacagtgtaaaactgcacagctacattgaaaaaagattggcactttttaataaagtttaccagataccacttctgggacctagcaatgcaattttcaggcatttgtccaagagtaaatatgttcgtataatgaatatgcaagaatgttcgtagcaactttactcatatccccaaattggaaataacccatatatcaatcatcagaagaataaaaatgttttaaatgtggtatatccattcaataaaatactactcaacaataagaaagaagaaatttgttttacaaaaattggaacaatgactgcttctgagttagtggtcaggaatagactagaaaagacacaggaagtgtctggggtgacaaaaatgttctgtgtctcaaaagagatatgagttacatgaatgtatgcaattgtgaaatctcattgaactctatatttaatatttgcgcattttactctgtctaaatttacattcaaaaaggaatgaaccagaaagtatcattcttaagacattatttaaccccaaataagacattttgtatacacaatcttgaaactcaattgtgttgtccatagagatgaagaaagttccagttacttgttaatcctggatttcagatatatttagaactcgtgtattctgttaggagagcaaactttatacccaagtttagtgattcctcccattcacctttagcatgaaaatacagagcaacctgttaaggttcatttaatttattctatattactatgttctctaaagcaagctaaatataaagatttctaacaatgatgcatttagtaggaatattaatatacataccttaacaaaatgttttaaatattaaatgagaaatattaaatatgtatgaaagtgttctttcacctcaacgtttatgatacaatttggacatttggcacacatgacatcaaatgcacgtgtgtttcatttaccctcatattcatcaaaatacatttttattaacttgtgttcgtaataatcacactagtgccagattataatctcagtgcttcattgcccaatcatccttcggatttgcaatattagttcccctttccaccattttctaaatgagaacactgaggttcttaatcactaggctgtttagagatggattccatgactcagagctggtcctcaatacctacttatatatctagatgctagtaactccaagtttaatgagctcatgaagtttatgtgggtttcagatatacctaggtttttattttccaagtcctgtggaatgaatgaaggagggaatgtgctcttgactgttagaaaaacagagagcagagagttagtataaaggcagaaggctctgtgtttctactgtctaagagacagttaacaactgccataacattatggcaaaactttcttacaatgtcaaatttctttgtctcacctgcttgaactgaaaatagactagtacatttaatactcaaaattgaatcatttgcaagatgttacttaaaaaataccttagtgggtttttgttctcattaaaatatcaacatgtaagtctaaccttgaaaaatatattgtttgcaagagaaatactcttagcctgagtggcccttttcctcctgcctctttttaaaagaagattaagccattgtttcctctgaattaaacatctaaagtaatgaaaattatttttaagccaagcaattacaagtttattgattttatgagttcaaattatgaccctaaaccattctttatgacattcctgagagaatagagccctgttttcctaaatgacagaacagttcttcttctgaattaccagaaaaggcagaattaataaaatattggtagctctacaaaaagaaaagaaaaaaagccagcaaacaattattgaggactttacaaacattaacttacttatgcttgcattggtaatggtagcaggtcttactgtcttggttcacaagtaattatggcttatggctcactgaagcgatgtcatcatgcagtcgtccaaatgctaacagaaggcgctggaatttaaatttaggtcattttgaccccatatcctctgtctctgttgcatatgtgttttatgatttgaagtattttatcaaaattcacttgagtgctagtctgtcataagcccaagcattcctagatagcagcctgttaaccttttagttgtcctcactgaatattaagcatggaaagaaggataaaatgcacaccgaggagccaaagttgttcaatttggttaaccctatcttgcgttcctccacagtttattcttctcaaatttcattcaataagttgaaaaatcctgctgttaaaacagaagttgttaatcatggaattcagcattctactttagcattttatactggattttgaacatcaaggttccaatctagttgctattttccttctatctcctttctctgggtgatttcattcatgtccatggtttaaattactacatatgtgtgcctgttctcaaatttcaccccaccccatttgtcttgtttgtgcttcaaattatttagttcagtccaatgatttcttctccatttggaagtttaactgccatctagaattcagtgagccaacaactgaactcagtcactactctgaaaaataaatattaaaaatctgagggagaaagaaaggaaggaaaatgagaaaagaagaagcagaggaaagcgggttgggggggggtgcggtaaagaaaagcaggaagaccagtttaaaaattctgtgttccacatttcagtgaagaacaccgacagtcatctagtggcccaccaggcaccagagcatcccgcttgacttcactacctcatcccatgcgtcaccacaacccaggacttacattctaagtatttctcaaatatacacacttttcccaactgcctttgccactagggttttccaatctctggcgtctattcttaaatctattcactagctttcccaatagtcttctgttttttttttcttgtcaactctcaatccaaactcaatgttgcaaaacgaggtgaatattcaaaaataaaaatctgaacatgccactcccggttcctagtatggtaaagagcttaaggcgtaaattatggagccgacttacctaggtttcattctggctatgccgtttagtactcagagcaagttacttagtaaagagtttaaggcataaattatgaaaccagcttacctgagtttcattctggctatgctgttgaggacttagagcaagttacctaacctctttatgcatccattttctttattgtaaaatgagaataataataatgatttctacctaattgagttgttataatattaagtgagttaatacatgaaaagcatactatgtaagtgccatattaatgttagttgctcttattttttccttattactgcttaaactcctcaaataaagcccaaaccctactgcagagcttaccagattcttgtgtttgagccaccatttacctcactgttcacactcttgagctgttagcattttccacccttattgtagaagtcctggctatgaacttctaaaattattattacttttaaaaattgacatataaaattgaatgtatttccatgtataaggttttgaagtgtgtgtgtgtgtatatgttgtaaatctacatacacacatgtattgtgaatagatacacatatatatgttgtgaatatatatattatatgctgtggttacatatacacatatatatattacatatatatagtgaaagaacaaaatttagccaattaataaatacattgccttacaaggttatcctttttttggtgagaacacaatatctactctcaataattttaagaatataatatattgttgttaactatagtcaccatgttatacaatagatctgttgaacttatttctcctatctaactgaaattgtgtatccttcaaccagaatctccctagcacctccaccctaaccaccctcgcccctggtaactaccactctattctacttgtacaaaatctacttttttagattccacgtacgagtgacatcatgcaatatttgtctttccgtgcctagcttattttatttaacatcatatcttcaggtgcatctatgttataacgaatgataagattttcttcttttttaaatgactgaataattttatgactaaaataatttcattttgtttatcaccacatttttttttatccatttatccattgatggaacttaggttgattccataacttggctattgtgaatactgcaataaacatgagaatgcaggcacctcctcaacataccaatttcatttcatttggatacataaccagcagtagaatttctggatcatatagccattctatttttaatttgttgagcatcctctgtactgttttccataatggctatactaatttacattcttaccaacagtgtgcagggttcattttttcctccacatcctcaccagtacttgtgtggttttcttctgtgttttctttcagtagttttagtttcaggtcttacatattagtctttaatctattttgagtctattctttgtatatggtgtgagataggggtctaatttcatttttcggtatgttggtatccactttcccagcaccatttattggagagacggacctttctccattgtgtgttcttggaaaacttgtcaaaaatcagtcaatgttgtcttatttctaggatctctattttgtccgtttggtctatgtgtttgtctttatgttaaaatagatcagtgtcatgctcttttgcctactatactgttgtagaaaatttgaagtcaggtagtttgatgtctccagctttgttctttctgctccaggttgtggtgactatttggggtatttgtagttccacacaaattctggaattattttttctatttctgtgaataatgccattagtatttttataggaattgcattgaatatgtagattgcttggggtagtatggacattttaacaacattaattattccaattcatgaacatggagtatcttttcacttatttgtgtcttcttcaattattatactaatattttatagttttcagtatacatatcttttggctcctttgttaaatgtattcctaagtatctaattttgtgtagttgttataaatggggttgtctgtatgacttctttttcagatagttcactgttagtgtggagaaacaatactgatttttttaatgctgattttgtatcctgcaactgtattgaacttgttattaattctaatagttttttggtggagactttaaagtttcctatatataagaccatgccgtctggaaacagggtcaatttaacttctttctttcctatttggatgccttttatttctttctcttgccaattgttctggctaaaacttccagtattatgttgaatagaagtgacaagagtggtcaaccttgacttattctgtatcttggagaaaaatctctcaacttttccccactgagtatgaggttagctatgggtttgtcatatgacctttactgtcctgaagtaaattacttctatacctaatttgttgagtgtttttcaattatgaaagaatgttgaacattgtcaaatgctttttctgcatatattgaaatgattgtatgtaattcttcactctgttcatgtaatgtattacatttattgatttgcatgtgttgaaccacccttgcagctcagggatgaattccacttgatcgtgtgaatgatcttttaaatatgcaatttaattcagtttgctagtatttggttgaagatttttgcatctatgttcatcaggaatgttggccagtagttttgtttgtttgtttgtttccttcttgcttttttgtagtccctttgtctggttttggtataagagcaatgctattctggccgtaaagttctttcccttcctctaatgccttatgtttcattttgccattgatgcattcacttgctatctatggaacactctttcctaaccatacatctccccttcttctttgaagtttcaatgtagatattccttcctcttggaattattttttaaatccctaacctgggttaggtgcccatcctcatacgctatgacctcatacttccttaatcttcaccacatttctatagaacattgtaactgactgtttacatgtctgtctttaccactaaatatataagtaccatgagagggggaattctgtctttcttgtattcatttgcatagtatctggtacagtgtaaggtcttaataaatacttatttaatttgttaaatgaatggactttgtgcattttgtccactgcacaaatgctcaaagccaaatgtgcgttataccatgttcagtttctagtggcaagaacacagaaaataaaccccttaatactgaagtcgatagattgcagtggtagatgagacatgtcccctgcctatccccagtgcctcgtcattttttattccagattcttgaactcatcagtaagaacctagccatagtcataatttttatttttctcacattctcaccagtcaatcactatgattattgattttctcaaacttaataaatgtaagatatctcatagccattatgatgtagaataccatagcttcgggatgcaaagattactgtagaactattattttaaaagttatgatttatagttatagcagatgttttaaataaaaaagaaaaaactgaactggtaagattcttcttaaatttatttatgattccaaagaagttttcacatatacgtatgagaaacagtcgtaatcatttaattatgcttctagtatatgaaaaccacttttaatgtttgtttgaatcattttttctttgtgaattgccaaagatgataaaaacacagtaccacattatatttgaaagtacaaggagaattcttcttcaatggtcccaaaggtagtgaactaaatggcttaaaaagtacaataagtacttctcagttatagcaacattttctaagctaattttcaagatatttcacttttcaaggtgattttttttgcagaaatgaaaaaaatttaaacagacttggttatgaactgttaggaaatatgatttcatcaagaatgggaaaatttaaaatgcagaaatgattgcacagcagtcttcacactgtctgaaagaacaagtggttaaggaagactacagtactttttctaatcatgtcccttgtgttttcggtctattgaatgtacaaattaaaaaaaaaattaaaaaattaaaaaacctaaaatcaaaaccacattttcctttcttctctactttccctgaggtcactttaattctttatatgctaagactatccccctcaaatgagaggggatttcccaaaaagaactcttatttcaatattcttcattcaatatatgttccctccatgtcatatgaattctaatcttatacaattcctttatgttcttacaacaatacactggtgatttaatatacttatcaattcatccctccatccatccatccatccatccatctatccatccatccattctttgaatttttagccaagcctggcactgcactaacaattttttgtgacccttagttttcccttaatgaatcatggttcacacaaggagaacataagtaggatgatgtttctctccatcagttgtttgtcgtgttaaatttagctatatctggcagtgcccagatttgataatgataagtgagtgtgatatacatgctagcagaaaggtattttattattcctgcatgcaatgagtaattttcaacccactgcaatctctgttggttgcagtaaacctcaaatacaaaacactcagctgaaattactaacaaaataacctttccaagtgatttcttttctcttttcctggtatcatttgaagcatgatgcccagtgaggtagaactttaatttgtgtttattcatttatttatttaaataaaggaacttgcacttgcaaagtgccttcttgtttccatttctatagatagtagcattcgtttgcttggggtgaagtttcttttttctccatcttatcattttgggagaaagtggacaaacttgcataaggagcccaagggcttgctctagtaaaaggataacaattcaaactatttccctttatgtccaagcctgaagaacctggggctgtgactgggacctgctggcaggacaggaagcatgaatccctgaagggaactaactctaaagaaaagaggaatcagaactaatgtcccagatacaacaccaacccctaagttttcatgccaggggatatagcaagtgagctgctccctttctaatccagctactgaggcatcatgagcgcagcagacagatgaatgttccctgtgtgatttttttgcatcttccactagacttctgactttcctcattggggagcaataacacagagacacagcgtgtctgctttactgctgtaaggagaacgacatcttatcacctttcacaagccaaaactgcaagatcctgggatcgagacttggaaaaaataaagagtggacttctcctacatgagtgggatgaaggcataaagacatttaatctattgcataacttaaactagagaaatgaccagtgatatagttgataaatattttgatcatttcactctgagcaaatgatctgactatagattgttgtactactttggaacttgaggaaacaatagatttatgttaaaagaaaccacgaggctagactggctggtatttctcctaatccccttcgctctaaatgtctggacgagatgggccacaagaggctcttgtgaaggatttggaggatgggcgtaaatctgcagcgcttttgcagctcacacatggtcactatccactgactcacctctgggcttgcctgtgacagcggctagcctgcacctgtttccttttcccctggctcctcctgcagcttctctgactcctgggccaggtgtgagttcagatgtttgatgaagggcccggctgctgcaggtcactcttgtcatcatggtcacaggcaacaacagcgaacgtgggtttctgtctatctccgtgggctctagatccagcttgtagtttccagcttgtccctgcttttcctgattctacatccggctttcttcccagacccagcttcctgtctagcagacaacaacaccagtctcatacaatagactagagaggctgcctgcccagctcccaccattgcatggggcaaatccatacttgtaataaattcatatttatttacttattgaattgaacgctgacagatacagtgtcccctggcagcaacagactgaagactgaagtgtcatcagcccacgttgtagttacctgggcacacatggcaaatgttacctttcagtgagtcttaaaggtgtgagtatttagacaactatttctcccactcttcaaaatttaagagtccattttaacaaaagtaaagcttattttccagacaaaagttatcccaatgctacttccccacccttgctttaaggcactgtatgtttccattttcccgcctttgttagattaaaaaaactcaagacaaaatgtttgactatatatctctaaagagctaaagcttatctgtttctcagaagattggatgtcgagcttttactgaactctatttttagatcactacctctttgataaatctctaatataagtgccagtgcaactggatgtgtcttttttgttttgtgttgtatttttttggtgtacgagattttaaatctcaaagataacagtacaagaaatctttatcatcaggcacatggcttatgcatcatcttcatcagcaagttgacataaaaagacagaaaattgctataaagttacgagtgaaaatagaaagtggccatttaaacgattatcaatgcaaatattaagcctgagtttttttctgggatagaaccacctctccttccactttgtaaaactactcttaatcattacattcctccaaatgaacaaaaatcctaaccatatttcaagcacatgtagaaaattagctcgtgaaaaaatagtaaaaatgatttattaggaaatttaatttctgtaaagttctcattttattaggaaatttaatttctataaagttctcattaatgatatattgggtcaggggtagtaacaatttattataagataaataaagcaacatgtttcttgatattggaaacctaagtacaagcaaagtttcctagcatagtctttgatagaatggttccaaaaaatatctcaaataaatgcacaaaatactggatatatctcaaagacaccagtgcatggagatctttatcatcaatgcatgttgcttaagtaccatcttaattaggaagctggcatgaaaagacagaaaatatacgcatatatatacacacaaatacgtatttattctttgtaaattgtatatatttagaaaatagatacatagcaattgtaatgaaaactaaaacacacctaagttggatacataagtgcattgtggtctaaggcaaaactctccctacagctaccctatgagtaggcctcaggaaacaacgtaacctctcattattcagatgaggaaactgacgacctaggaagtaaagacctgtagtggtcactgcagggtcttctgacttctaatccaaaatgctgacttctccctctggtcctcaaaagaagtcacctagcactctgtgataactttacagctccgactggaagaagaagaagaagaagaaaaaaaatagcctgatttattccctttttacttaaaaaacaaaatccacacgctaagaatattcctgttgttggtgtgaagggagtgatttcacatttgacaaaatgatgccaactcagacgggtgttgctggtgcctgacacccgcaggctttggcacctctaaattcaaaaccagctgccatctctcatttttaagctcttagaaccaccttccactaacaagggtcatatttaaactttcagttttttcaaagttataatatgtgtgaaaagcaggatattaaagcagatgaagagagagccacacagataccagagggcagactgttcctatactcagatgcaggctggaagctaagttactatttcactactagagttcttggaaaataaagaaaggaaaggtactgagaatctgggtctgggtcctggcccctgtgggtttggtattttaaaaccacttaaacgatttatgtcactttttttaacagtcaccaggcacctgctgacccagctctactgcttgctagctatggaactttggatatgttgacctctctgttcctcagtttcctcatctttaaaattcaacagtaataatatctacctcatgaaattgtgttgttcatacccacgtaacgtactctagacttgttgaatcagatatcgaaggcgagcacctgggggatccatatttttaataggcactttcgagtgattgttaggactgggcaaatttactaaacattattaaaatggaaaaaggataaatacagaagtcagactccgattcaaggagaataatagacaaagtatggacagcacttactgtgtgccaggcactgttctaaacactttgcaagtaatttaactgttgttggtgtgaagggaatgatttcacattttacaaaatgacacaaactcaggagggcattgccagtgcctgatacctgcaggctttataaattttagaaacatatttagaaaattgtaatgtagcaactataaggaaatctaaaaacacacatagatcatctagtctttaaaattagagagtaataatatcttccacatggagttgtactgcggttgagaaaatgcacaaaaatgccaagaggtttttgactattataaacaatatcttagtagttattattgttagtgtgtgtgaggcaggcatgttcacatttaatcctcaaattcctctgctaggtcagtgtgtataaaagaagaaatagaagcccaaaacgtttgaataaattgcttataattaacacaactgacagacaacagttgagatctatgggatgattataatgctgtttctacactcctgtgatatgatctccaatcaccagctcaggtaactgtttacctccaggagacacttcaacatggtggttacgagtttggactgtgtcatcaaatggtctgggatcaaatcccagcactgctgtttatggctgtgtgactgtgccagtcctcagcctctccatgcttcagtcccttcatctgcacaatgggattcataggattgttatgggagtaaatttgtaagtaaatacttgcaaagtgtttagagcagtgcctgacacacagcaagtgctctctaccctttgcctattattcttcttgaatccaagtctgacttctgtatttatcctcttttcatttcaatagtgtttaccaaatttgcccagtcctaaaaatcacttgaaagtgcctactacaaatacggattccccaggttcttgccttagatatctgattcaccaagtctagagtaggttacagggatatgcatttttcacatacctgatgcttccctccccaaccaaccagatgacttttacgatatagcaaatgtagaaattctatatgagaagtcctcaaactttagtgtttgtgtgaaattatctatagagttttggaaagtccacatgtctaaaccttacctgtggagggtgtaatataaatgaaaggttagacccgcgcacttgacatttttttttatgattatactttaagttttagggtacatgtgcacattgtgcaggttagttacatatgtatacatgtgtcatgctggtgtgctgcacccactaactcgtcatctagcattaggtatatctcccaatgctatccctcccccctccccccaccccacaaccgtccccagagtgtgatattccccttcctgtgtccatgtgatctcattgttcaattcccacctatgagtgagaatatgcggtgtttggttttttgttcttgcgatagtttactgagaatgatgatttccaatttcatccatgtccctacaaaggacatgaactcatcattttttatggctgcatagtattccatggtgcatatgtgccacattttcttaatccagtctatcattgttggacatttgggttggttccaagtctttgctattgtgaataatgccaaaataaacatacgtgtgcatgtgtctttatagcagcatgatttatagtcctttgagtatatacccagtaatgggatggctgggtcaaatggtatttccagttcttgatccctgaggaatcgccacactgacttccacaatggttgaactagtttacagtcccaccaacagtgtaaaagtgttcctacttctccacatcctctccagcaccagttgtttcctgactttttaatgattgccattctaagtggtgtgagatggtatctcattgtggttttgatttgcgtttctctgatggccagtgatggtgagcatttttttcatgtgttttttggctgcataaatgtcttcttttgagaagtgtctgttcatgtccttcatccactttttgatggggttgtttgtttttttcttgtaaatttgtttgagttcattgtagattctggatattagccgtttgtcacatgagtaggttgcgaaaattttctcccattttgtaggttgcctgttcactctgatggtagtttcttttgctgtgcagaagctctttagtttaattagatcccatttgtcaattttggcttttgttgccattgcttttggtgttttagacatgaagtccttgcccatgcctatgtcctgaatggtaatgcctaggttttcttctagggtttttatggttttaggtctaacatttaagtctttaatccatcttgaattgatttttgtataaggtgtaaggaagggatccagtttcagctttccacatatggctagccagttttcccagcaccatttattatatagggaatcctttccccattgcttgttttcctcaggtttgtcaaagatcagatagttgtagatatgtggcattatttctgagggctcttttctgttccattgatctatatctctgttttggtaccagtagcatgctgttttggttactgtaggcttgtagtttagtttgaagtcaggtagcgtgatgcctccagctttgttcttttggcttaggattgacttggagatgtgggctcttttttggttccctatgaactctaaagtagttttttccaattctgtgaagaaaggcattggtagcttgatggggatggcattgaatctgtaaattaccttgggcagtatggccattttcatgatattgattcttcctacccatgagcatggaatgttcttccatttgtttgtatcctcttttatttccttgagcagtggtttgtagttctccttgaagaggtccttcacatcccttgtaagttggattcctagatattttattctctttgaagcaattgtgaatgggagttcactcatgatttggctctctgtttgtctgttgttggtgtataagaatgcttgtgatttttgtacattggttttgtatcctgagactttgcctgaagttgcttatcagcttaaggagattttgggctgagacaatagggttttctagatatacaatcatgtcatctgcaaacagggacaatttgacttcctcttttcctaattgaataccctttatttccttctcctgcctaattgccctggccagaacttccaacactatgttgacattttttaaattcagtgatccccattggccttgctggttgagatcatctcactgtatccacccagtaacattcagtatgtgtaaccttcagtctggctggaagggcctaggttctcacagtcgtggcaaacattcacagaagatgccaaggttaatccaaatagcaattcaacgtttcactacatggagggtatcccggttttgtaagtaagtaagaaggttttgtggtttcagaattaaacaccacctgtagactgatgggcataggtcaaattctggaattatcctgtttacattcagcaaacttgaacaaaaaccttgacctgtctgctggtcttttctgttctacttttctttgcataaaaattgtgaagattgagagttagatctaaaatctgtggaggtacaggggatggttataatcctgttcctacccatatgtagtgtgacacagcaaacaccaactctggtgaccaagtttccaaccatgatattggactgaagattcttccactctatagtcattggccttaacttctatgaacacacttgctagaaaaatgataggagacttttatttggcacagaatggaacctcacacccaaaccatgggaacagaatagttttaatggctttaaagtcaatgacagaaatccaattcaaacatgttaaatacacacacacatgtgcactcacatgattgagaagcccaggatttggatccaggaactaaggtcatattgttaatgtctcttccacatgtctccccacatatccaaagttcctacattagacctttcatgtagtaagttttcaatgaatcattactgagtgactttttaacttactctatgtgttttctgacgtattttctaaactgtgcatatctcaaattttggataaggtgtctagattttttaaggtactttacaacttttttcttttgttaaactatgttctgttgagtcctgtgaatttattcctcattgtaaaagtactgaacaaaataaaaaatacatttgtagccctgccatcagatacttttgacatcttggcctcatttttaaagtgagaacattgatgttttcagaactttaaggttatgatatttttgtatgtctgaacttaaagatgagctatgtgttctctgttacctttctccttcaacagaggattgtacaacattcatatgagatcatctgagaaaaatagcagcatgtccccttaaatttgcctaaaaatatataaaattttgagttaattaattgactgaaactacaaccactggcaattatttcttctagttaaccactgcctcattatcccaggccaagcttctgtcattcatttcttcatgcattcattcattcattcattcatcaaacatgtgttgaacgtgtaattagatgttagagatacagagttgagtgaaacaaatgcagagagggaatgacaaatctcatgcatgctggtgcagacttgattaattgagcgaatatttatcaggtatctcctaacactcaagcatcatgctaggctttgaagatatagttgtaaacaagaaagacagaatcactctccttatggaacttaaaacatagtgaaatggaaaacaaacagctgaataaagaagcaaataaacagaatagatggagaagctctatggaggagtcatacttcaggtcctgtgacaggataaaactgtaataagattttgtggagataattggtggtatttttaagagatgggatagctagaaggtcatatgtgattttttttgagaactgaaggaatggaaggatgggtacaagacagccatgtgaaacaacaggaagagtattccaggcaaaggaaaagtatctgcagagacccattaacataagttatagtacgggaaggagataagcatgagtaacgtgtgataaaacaagacgggtggggagaggtgggctaataagtcatgctttaagacatggtaataaatttgatgtttactcaattataattatgatgttaatggatgactacaatatatctaataaatgtttgttgcgtaatggttcaaaacaggagaaaatacacacaggaaattgtaaaagatacaaaataaagagcagtttatcataagtgtccctagcacatagaagtgtatatataattatgaaacaatttcaaagttacagacaaattaaaagaatagtatacagaattcccgtacaccctttgcttagaggctctttttaagtttctctaattgtctcattaatttcctttgaagaaaaagaatgaaacccagaatcggacatgatacccagttgtcagctctctgatctcctgcaatctgggactggttcctgaacttcctggactttcattctctaagtttgcatgccagtcatttcgtggaatgaccctccgctgggggttctctggttttcttcgtgattagattcaagtatgcattttttaatgcattaaaacacattaaacataaacaaaacataaaacaaaaacacattaaaacagatatggtgttttcttctgcagcttgtaccctatcccatggctgatgaggcatgtttgtgccacttctggtgatgtaaattctgttcccttcattaatatggggcctgcctagtttggtgcccatagaaagttatataccccttatatttcataatattttgtggagagataatttgatactaaacaaaactccattcttctcactttcaccactggttttagcagcattgatatgccttttctgaatcaattatgaccatgattataaccgtaaaatttagattttctatttcatcattttctacagccattagtttgcattctattgtgtagaaggacatcaccccctttttattcatacatctattcatattagtataaacttgtggatttctgtttaatttagtgagttataatctcttaaaattgtattttattcattttgaggattaaacagtcccaggttgtatccagtgagaaccccttcaaactgtctgtatttttttttttttacaagtcttcttcattctttgaggacttccttactttctggtacaacaaagtgctttgggattattcttttccggacctcgacctgggagttgactgtgtccttgacaaggcctggttgcttccagtagagaaatggtccaagacctggacatagttgcacccatcactactgggatgccagtgatcttaggacaggaggggcgagagtttatgtaaatacctccaattccagccaacatgcaaagttcattctagcttttctccctttccatttttggttgtccattctcagacagtgagaaagcttaccagactatcttctcattccactccactccaatagcctcctcaggtggaccacagttgctaccagactaatgaaaataagtaaaaataaaaaagaaggaaggcagatactgacttcacattcttactggttttcataaatgaattcagtggatccagagtgatataatgtgtattattatttataaacaatatccagcctattttaatctaaaattgttagtcaaccaataagcttccccctgagggtctttgagagaccaacaccactgggtgtcatcttaacctagccaatggctacacggctctatgtcgtaaatgtctatgctaaataccttgttatgacaaatgtgatacgagaggaatgaatgacatcaaactgcaacaaaagtgtgaaggagaaattgatatctcatagggacataaacggttttctcaccagggcccagtttgtattctaccttgatcttatttggagaaaaatctaatacctaagaaattataaaactgttagatttgatagaatttgcagaagactttgaactaaacacatctaatctaaaaaatttcatgatggaaatgtcaactttcttaacattctactttcttttattttctaatgccaaatacaaattcactctaaattccgttacagggatttagaggcacgtgtttgagacattgacagttgttcaatagtggattttaaaagatcattagtttgcaggaatgcctgagagaggaaatgcatgattcatggagaagtatgcctcactgaccgatttttcaaggcctctttcatcaccaaagacaaactttgaccctgaaatcttcattattaatgtatatacagttctgattctctctgtttcatttttatctccacatagacaagtctttcatccacctgttcagtcattcagtgaatcccagtaggttccttccatctcgtaggcatggataaaaagatgattaagagatatatagtttactcacatgtatttatcgagcactattgtgtgataagaattattcttgctgctgaggatgaaacagtgaacaaggcaaacaaggttcgtgttctcatggagtttgtggaagattgacatgtaaattaatatctgctttccagaaaataaaaacgctagaaagaccatgaaacaagccacttgatgaagtgacgggaatgctactttctgtttagtgatcgaaaaaggcatccctgaaaaagtgttgctgaatctgagtgatgggaaggaacccagtctaaagagatctttaggagcacattaaaggagcaatagtcttttcttgtgtgggtggaaagaccacaatgtgagctgaaaattccactataagatgatcgtgaatttaggcatacagaaattactgagttcattaaggaaggctgggagcaggaaggctgcacagagggcaagatttcataaggcctgctgatgtatcagaacttcttaagcaggttagagggagaaagatattccagaaagttgactcatcatgggcaaaggctgaagccacaaggtatgttcaggcaatagaaactggtgagtacacttagagcttacaatgaaatgagagtgtcaatgggaatgagcacaaaaatgaaaacagaggatagacttatttatttttttagttatgcattatttcttgtgcattaataacttcacatgcaattcagatagtatttgatgggtgagagttttttaaataggtaaatgatccttgtaagtacctggatctaggatagtcaaggtgtttctcaccgtgtcttaaaattcttaagagaagctcagaagcttatgtttaaaaatgaagggatggctaaatgagaagaccttgagtattctcatcccgattgaactggacctcctgatttttttatgtatttagcacgctaggattctgttttacttttttttttgaggaataaatttcactctttaaaaaataaaaacaaaaagttataaaaatctgagagctgggccaggcatggtggcttatgtctgtaatcccagcccttttgggaggccgaggtgagcagatcatttgaagtcaggagttggaaactagcctggccaacatggtgaaaccccatttctaataaacatacaaaaaaaaaattagtcgggtgtggtggcgagcacctgttatcccagatactcgggaggctgagtcaggagaattccttgaacctgggaggcggaggctgcagtgagcagagatctcaccattgcactccagcctgggtgacagagtgagactccgtctccaaaaaaaaaaaaagaaaaaaaaaaaatctgagagttttgcttctggctgtggcaggataacttctttcagatcatccccacaacacacctatagtttataaatataaacctagggaaaaatatacctggaaggtactgcagaatgcccaagacatctgagacttcagaatagatcatttattattggtgctactaaatattcagcaggaaaaacagtttccacttttccacttttctctgtgtttctattttggccctaagtagaagactcacctttttcaaaagtagtgagaagagcagtctctggcctactatccagttccacaattattagattggtgccatttggatctaagcatatgtgattcagcttcttttttcttccttgaatttgcctgtgtgttggttacatttctacttccatattgcaagcacccttgggtaaactattaggcctatatgtgcccactgacaacagctgacggcataagaaagtgactttgggtgtctgcgggagtgtctcttttgctcttgagaccgaaactcttcttgggataattcatcccaaggattaggctcaggaagcactacagagcttgacattggctgcagattgaagcaaaacttcccaatgtaaagacatttactgtaaaaaacgaataaagaggctgaaattttgatttccatatgtgtgactcctccctttatttttcagttggttcagaactcagagggaaagaagtgtcacgatccattatctctcaaatctcaacacataatataaatcaataaataattggtactgtagctctacgaggagacatttccaggcctgaatggttcatcattctctgccttgcatcccacagttctgctatacaccactgagaaaatgggctatcccacaggattcatttcaacaattgttattgagtcctttctattggccaaatgttgggatataaaaattgtatagtttagtaggggtgatcaaagttgtgtgagtgaactagaatctatttcatcttcccagagaggcccgtcctgattctcctttataaatcagtcttaaccctgactccaatctctatccacccattcattactctctattgcattctatttgctttgctgcaatccattgtttatataaccttatctatttaattattaagttatatattggtggcctaaaatgtcagtctatgaggcccatggcactacctgttttagtcaccactgtatccttccgaactactatatggtagttgtcaataaatgtgttgagaaaattaattaccaattattggtagaatatcactttataagaaagtcaataataagatacaggctgggcgcagtggctcatgcctgtaatcccagcactttgggaggccaaggcgggtggatcacctgaggtcaggaatttgagaccagtctggccaacatggtgaaacccgtctctactaaaaatacagaaattcactgggcatggtggcgggcacctgtaatcccagctacacaggatgctgaggcacaagaattgcctgaacccaggaggtggacgttgcagtgagccgagatcgcaccactgcactccagcctgtgcgacagagtgagactctgtctcaaaaataatagtaataataataagaagaagaaacaataacattttctacttttcccttggaaaatcaagaaaggctaagaaaagtaagaggcactagatgtaggtttgaatgaatactggattttcagtgtgtatagagaacagcctaaatacaaacatggcacagcactgaaaagtccattttgattcaatgagcactggaataatgattaacctctataatctcaacaatttgcacatattttcagtggcatgaatcttactagttctttccagtcattcaaagacatttcaaaatacaggcaaattctctttttggatgagtacagaaaagaaccacgatgcctaagggatttttttagtccttttttgtataggaagttctatctgatattgaagtgagccaatcctggctgcaagattgtgggtcaagtttgagcaacagttcactgaacaataattttcttcaattgaatcttgcttttgctggggaaattcactctgcactgacagtactgagagctccaaaataagggttatctatcttatgctttccaagtcaagtctatcgttaccaccagaaatcattcattagcacctaatcatctaggttgggccttagctgtgtctctggagaaaacaaaataaatagacacccccatttctttagatcacctgtgaataaattctatcatagtgtcattaccattctatcacctataattcgtttttatgcttgacttccctgtgggataatgtgacttggtgaatatgggcttgtcttatttcccacaatatccatagtccctggcactcagaaaggccttaaatatttgctgaacaaatgagttttgtaaatggtaacatgaataaacataaggctatgcaaatcaccataaacattgaacaataaaatatattgtgcatatatttgcatggtttctcaagattaaataagaaattcataatgtccatcataaagccatcgattaaaactcctgtttaagtttacttttaaaacgatactatgggttagaagtataagtatttaaaaatagagctagaaaattaattggttgaggaataaggcataaatgtgaccacaaatttcctgtgcagacactttttgggtcttcactggatttttattgcctgttattctgaatgtatattcagaaactactgaatgaatattttaatttatttttatctattggtttactatccgagaatgtttgcataattgacactttcccttgataatgtatattaaggcaagtgtcttgattcaatgactacagcataccaaatttttaaaaactattaagcacttactgtatgacatgcattattctaatagctggtaataccactaggaataaatacgtgcttattattaaggagcctagtcaagtttagtctacagatattgaacatgtttatattagtgtggtacttgttccaagcagtttgcaactagcagaggttaaacagaagacatcaaagttgaatttctcttttttatttaagcctaaattgtacttgtgattttcaaaaaaagaatgtctggaacttgtacaattgtcagtcaatctagcccaaccagcatcttgagggaagtctttgccaagccactgctgataagacctatgtgaggcccattccgtcgccatgctgactgcccaagggcacaggtgtctctccaagatcacaggccagaatctgtctggcaaagtatccaaggtcgacatgagaatttctacaatcttaccccttcctcccctcacacgaatgagccaagcaatccttttccctgaagtcatatggcagcattatttttcttcagtattggaaaagaaataatgtcagtaagatcaggagactgtgtacattgaagatttctttttttattttaatttttattttaagttctggggtacatgtacaagatgtgcaggtctgttacatacgtaaatatgtgccatggtggtttattgcacctatcaacccatcacctaggtattaagctcagcatgctttagctatttttcctaatgctctccctcccccaaccccacccaccaacagggctcagtgtgtgttgttcccctccctgtgtccttgtgttctcattattcagctcccacttgtaagtgagataatgcagtgtttggttttctgttcctgcattagtttgctgaggataatggcttctactccatccacatccctgcaaaagatgtgatcttgttacttttgatggctgcatagtattccatggtgtatatgtaccaaattttcttaatccagtctatcattgatggacatttgggttgatttcatgtctttgctattgtgaatagtactgcaatgaacatacacgtccatgtatctttgtaatagaatgatttatattcctaatttcaacaaaaatcattcaggttagtggaagctgaagaagagtcttcactacttggtcattagagatatcgcaaagaaccaagggcagagagatggctgtgaatcaggtagatgatggagtcagaatctttttctcttatctctaatcttttgaaaaaataaatagacttcatttgtttttgtttcccttctcttcttcagttacagttgggtagaaaatattagtatctgtattttctcagagtctctcccaccacccctgctagctgctaccaaaatctgctatcctcttcttccccagtaatagatgatataatcagagcacatggctgcctgaagtgtctacactgcacctctggtgcactgatgtggttaacttctggcaagtggaatataagcagagggaataaccacaatgtgcaagaagtctcctaaaagggagtcacatggaagaaaaaaagaacctccacctcctttcctccaccttgctgcaagtctgatagccagaactcaaccaacatggggttggaccataggaaaaggaagtaaaaaggaccatggagtaagataataaaaggcaacagagtggagtctgggcacctgataccatacagcattgtcacagccctggaacactgattcttgagatttgatatggtagttaaatatgatcttttctaagctactcatactttttttttttcctgtattaactgcttaactgaatcctaactaatagagatactttgtcttcccctacctctctactattatttccttcttatattttcctatcctcttactattttcaaatcccttggaaaaacccttgtttgtgatcctactaactggtcctaaagctgactgccccttaaaccccgactatgtaagagaactagttaggggttttgtgtgtaagtgaaatcgatgagcttgacagattccagtagagcacagatggggagcctggacattcagaggagagacttggaattattcacgatatctccgggaatagtccttgaagactgaaaatgattttttgctaggacagataagcccaagtacctcatgacgcagggtattacgcttagagaactcatcacctcataaagtcaacttactttcaaatgtcaataggttcagaaacagtttagagagtagctcagtgcttgatcaataagacaaatttaagagctatctggggtgcaaccctaatctaaagttgaggccagggagtgatcacaaggtcttcccatggtacatcttttataattgccacaaagaagaaaatacctggaatcaaaaggccaaggatttggccaataaagattcaacatttttatcattatttctaaggagacagggtaaattgtgcttgtttgataatgcttatcctcaaagtctcaaagcaggacacagtgaactaagtacctctcaaagtcaggtcagattaggcagaaagccttgctgttttttgatgtcatggaaatcagtgaatgttgtagtcctcttgtattatatggccagaagagggcaaaaccacttgggcgtttatttcttcatttaaccactgcccccacccattccattcatcagacacctttcactatatcttttttattggtgatggtttctttggttcactgataattggaatactggccttctttgctgctctataaatttggtagttactgcatttatggctatgtcaatctgacacaatatttcagccatgagaactgagaactgtagcttgaactgatttgtggaaggcaggcaaacatttggaatgtggagattgggagaaatgtacactcgatttgaattgggggaaatctttacctgaacattgaacatgtctttaatattgctccaacacatcagttaatggggcaccttaattatgtatgagagagaaaatcatctctaggccattcttgtatgaagcctgtattggggaaagaagcaggtatacctttaaaaaagtaagacttggatttacttcggtctctgttacttaatatgttatttactagttactaggttacttaaatgtgaagaatattgtttaatattctctgtgtctgataaaatttggggctccttcattttctcttctttttattcgctaacatattggttattattcatagaagcaggttaacatggcagttaagatcaatgggtttaggaatcagactggctggattaaaacccaactctatctcttctagcttatgatcatggcaagatccttaaattatctgaaccacaatttcttctctgtgatatgatgatatttgactataatacctgcttcataaatctattaggagaattaacagagatcttgtcagtaagtgccctttgaatgcaaattatccttgttacgcattacggccaatacctgtgacatccatggccatttggcagtgctctgagggattctccaagaaagtaactaccttctcacctgaaacagaagctgatttgaactcactcacaggcaccttgcagagtgtaagccactcaggggtttgccatattaagccagcgtaacttcaaaagatcaggttgaagtgcctgtgaaatcatattgagaacatcacatttgtaccatctcaacacgtgatcttcttgtgaagtatattcacatggcccagccattctgcctttgataaggcattgtgcattactaatcgatctgatggaggttgaaaactggtagattactaggcacataaatatgtgattgcctgtaatggacacatttttgcgtattattctacatttttatttccagtgaatttcaattctcatagaaacaagtgatcactttaaaaagtccaaaatatttacttataaagtgctttttctactttggcaacttgctatatttatcactgatgttcagctatctggctatctgcccacaaatattgcctaaggatatatttcaccccaggcactgtgctggatgcagaggatacagaaatgagtaatgtacctgctctttattctcttgtggttcactgtctagtgaggtttgcagctcactgacctcatgtaatgtgataagtatttaatgaaaacacgtaaagcattctccaagagcatagaagaggtctcctccctcggttggaggagtagaagaaagctgcacaggatgagaaaggatgcaagcagagacagagaacaatccagcaatggattctgggagaggcagctgaatctgaacattgtcttcacctgtgcttctcccttactgtatagcttagacccaaacgcttctctcctgtgcaccttgttttttctcatcttatttcacatacaggaaatatcaattcagagtcatttgtgtgtacctgttaaaaagaaatgcagctacccaaaccttgtctcaggcctattattcactcattgatttattaattcattcagcatattttattaagcacatgtttactaagcacctagtatgtcccagatactgtgctaggaactggggaacaaaagtcacatatccatgacaggatttaggggtgacaaacataaagactcattatattaaaatataagtaataataaaataaacatttcaaaggagagcatgcaatagcaccagccaacatataggagcatattcctggaggatatgaaaggtgaactgagatgtcaggaatgaggcaaaaaagaggcaagtcagtgaaaagagggaagaattatgcctggaaaagaaataacatatgcacaaagcccatggaattagactctgtagaaggtgggaccaatagagcaacattttaaagtttccaggtgatctggatgttcacttagagttgacaaactcttgctaatccctgtttcatgttttacagggctgttgtggtaaacaaaaagagtcttgaaaaagacctttgaaaagtaaaacaacaacaacaacaatgctttacactgttgtgtacatagtagccctcaaggagcaacaagtaagaattgtattcaagatattaaaatgatgagcccttggtctaactataactttgaggaatgacgcatatttcaaaccaagattgacatttcatgtcacttttgccataataatatgattcttacactgtttatagtctctacactttccacttaagaggtgctctacctcaatgtgaatgcaaatgttatatagagattaatgtttatgagaatgagggaggacatcaggtgagtaggatgagtctgaaaattaaaggtgaagaagttctgtctacttgccaaaagaaattgcatcttgtagtcatgtattgagcatctggtgaaaaaaaaaaaatacatctcagacctaggagtcatactagagagtgaaataagcagaggagctttttttttgtccattaaaacaaggaagtctgaaaaactaatcactcagagattcataaagcatcagtgaaaactagctatggttttcactgtcatatttagacctcaagctctaaacctacaatacccaaaccaaccgaagtctttaaataacttcagttccaccgtaagttaattataacaccaagttagacagctagatcttagggttggactactaaggagatatacaatatcttgagatgttccagtgaaatgacatgataaaaatgtcaaccttggattaatcaggagatgcatagtgtactttaatccctgacatttctagtggggtgtgtgtgtgtgtgtgtgtgtgtgtgtgtgtgtgtgtgtgtgtgtgctgttgggaagggaaattttcatctggcagaaatcaaagttaatggaggtacagacctgaaccagctgctccgtggtataattcagctgggcatggcaatgtgatataatgggaaggggggtccagagttcagtgtgaatcctacttgatttgtaagtgtgggtgagtaacttaacttgtcagtgtctacattttgtcacgttaaaatgagaataataatagagttatgatggggattaaatgagacattggagttaaaatgcttggcatatgtacagaattccaagtgatttatgtagccacaccgctctccaaccactaccaaggagttggaacctaactccctcccttttagctgtgggctgcctacagtgcctttttttttccccaaagagtacagtataaaaggcaggaaaatgaaaagtaattttacaatggagaatcctgacaaatgctacttcagccaggtaatcaaggtcaacatcaatatcttccaagataaatcatgtagatagtatgcaccattgatataatcagagaataatgacatttcacctgtttggtctaatgtagtttggatgtttgtcccctccaaatctcatgttgaaatgtgattcccagtgttggaggtgggacctagtgagaggtgtttgggtcatgagtgtggatccatcatgaatggcttggtgcctaccctgtggcagtgagttcacatgagagctgatggttaaaaagagttggacttccatgctctctcttgcttcctctcttaccatgtgacacaccagctcctcttctcttccgccatgggtaaaagcttcctgaggcttcaccagaagccaagcagatgctggtgtcatgcttgtatggcctgcaaaaccatgagccaaataaactcattttctttataaattttccagcctctggtatactttatagcaatgaaaaacagattaatacagtcttgctcccccaaaatccataatttcagtctaattattagaagaacatcaaatcaacccaaatagatggtattctataaaaagcccaaccagtactcctcaaagctgtcaagattatcaaatacaagaaaagacagaaattgtcacagtcaagaggagcctaaggggacatgatgattaaatataatgaggtttcctagatgggatctcatacaatgaaaggacctcaggtaaatactaatgaaatccaaataaagtatggaaattgtatagagtttacttgataataatctaacagtgttagttcattattcttataaatatatcatggtaatgtaagaagtcaacaatagaggaaactggatgtggcatatatggacttctctatattatctgtgcaaattttctatccagagaaactattctaaaatttttaaaatatatatattttaaaactctaggcacagtgcatggaacatagtaagaaccgaatacatgttccctctccaccttatcttccttcttctcctcctttctccagtttatagaacttgaagattttattttaattagttttcagaggccattccttagtggtctaatctgatatttaaagacatatatgtttctcaaagttattgcacatttaaatacgtaaggtatgatgattctgcttgtaaatcaaattgctcataaaataatatcattttattacctcactttataaggagtctggaagaaatagatacagtaatattctgcaacttaacaatgccgttaaatacccaagacctttccatgatttcactttgacatcttgagaacacatgtgatattttgcctcttgttcccaagacggccactgcagctccaagccatgcatcttttacaagacagtgtctaaaagtagtacgagaaatacagacttgtcttcaagtcttctctctttttatcagagatgaacctcttttcaggagctttctagaatacttctcttgagtcccaatatatctggatcactggcatatcactaaaagagtaagaaatgggattgatattactacagattatcttaaaataatcatgattcttcccctggggctgaataaattactcctagacacctcaaatgaattggagctctcttaccaagaatatggagaataactgttgatcaggcaaccatggtgcataatatagaaattaagacagtacatttctaccttcaaaattatacttggactactacctctaggaagataaaataggcatattttttccattcctccttttaatccaactaaaacccctggacattatatataaaacaaatataagaaggccctgaaagtttaaaaaggatacagatcagcttggacctggggatgcaagcagtgacacaatggtgagatccctgagtttcctttttgcctcatatatcccagacctggagctgaagaagctgggatgtggaaaagatcacacacacatatgcacacacacacacacacccaaaaaaaacctctctctgtctctctctagctaaaggactaggtaagaggcagcctagcaagatagaaaacttttagacaagtgccctagtcaaactaagtaccatataaaaaactgtggccttactcccatctagaccagaaaaatgtgagtggtgatcctggatatccatttttgagagcctgcaactaggtataaccccttgccacagtgatgccataaaaaacatgtagaaggcaggactttcttctccaccagatgatggtaacggccccacccccatggtgtcagaggagaccaggatggtggtcctggatctctacttccactctgcagcaaaggtatttctcctcccaactggagtggtgacagagtaagcctagtggaaagtttggacgtttaccaccatccagcaataaaaaggttacccatcctccaacatagtgttaattggatggcacgtgggaagcaatcttgtgacactccaaaccctctcagccaagtaaactctcagtgcggttttggtgggaaactagaatacccaactctgcaaatcaacatgagcagtcctcctaccaatacattaatgaagtctgaatggggaacatggacttctacccccacctggctgtgatgagatggaagcccctttcccctgccatagtggtatcagaaaacaaaacaaaacacaacaaaaacaaaagtcacaaacagctaagtcaatagacttaaataatatagagagactcataccatattcaaaagatccaattttctataaaaaaaattagtcatgccaacaagccaggaagatatcaaactaaatgaaaaatgataattaatagatcccagtgcaaaaatgacagagatggtagaattatctgaagaatattctaagtcagccatcataaaaatgcttcgacaagccattacaaatatacttgggacaaatgaaaaaaatagaatgcctgagctcagaaacagaaactctcagcaaacacatagctccattgaattcaacagtagaatgtgtgggactaatgaagaaactggaagcctggaaaggagaacaataaaattacacaatctgaacaaaagagagaaaataaattgaggtaggggatggggaaaacgaagcctcatggactggtgagactataaaaaggccaaaactctcataggagtcacagaaggaggggaaagagaagaaagggctgaaaaagtactaaaataatcactgaaaattccccagttttgcaaaatacaacttacaggttcaggttgcctacaaaaagttgagcaaagcccaagaccagaaatccataccaagacactatagtgatctaatgtagagagaaatgacaccttaccaaggggaggaaaagcaatatggatgactgctgatttttcatcagaaaccgtggagatcacagggaagtcacacaacatcattcaagtgctgaaagaaaagaactgtcaacacagaatcctatatctagcaaaaatatcctgtaggaatgaagagaacattaagacattctcagatgaaagaaaacaatttgtcaccagcacatctactctaaaataaagactaaaggaggttttctaaactgaaacaaaatgacaaaatgaaagatctcagaataccgggaagaattaatgtagtaagcagaaatatagatatagataaatacagtagacttccttctcctttgggttgtcttaatcatgagtgatagtgaaagcaaaaattataacactgtctgacatggttctaaatgtatatcagaaactatgttaggtagtaatattataaatggggatgaaaaagaacataaaagtaagttttttgtgttttcttaaataattttcttgaatggatttccttgaatgacagtaccagtagactatgataaaattatgtatgtataatgtgatacctaaagcctccactaaagttctacataaaactacactgaaaaacactatatataaatcaaaatggaattctaacaaatgttcaaataaaccacagggaatcaagaagaaaaacagaaacaaacaaaaagaatgaacaaaaacaaattattaaaatgccagatttaagccctaacatatcaataattgcattaaaggtaaatgatctatatgtaccaatgagaagtcattgtcaaggtaagttaaataatttggcccaactacatactgtctataagaaattcatttgatgtaaaataatacatgcaagttgaatataaatggatggaaaatgatatttgtgcaaacattaatctaaagaaagcaggagtggctatattaatatcgaaaaagagatcagggatgctatagtttggatttgtgtcctcacccaaatctcatgtcgaattgtaatccccaatgttggaggaggggcctggtgaaaagtattggatcatgggggcaggtttccctttgctgttctcgtgatagtaagttctcacaacatctggttgtttaaaattgtatagtacctcctccttcactctcttcctcctgctccagccatgtaagatgtgccagcttccccttccaccataattgtaagtttcctgaggtcttccaagcaatgtttcctggacagcctgtggaactataagccaattaagcctcttttctttataaattacccagtctcggatagttctttatagcaatgcaagaatgaattaatacaaggacaaaaaaaattagagatagaaatggacataatataataataaaagagttaatccaccaagaagacatagcaatagcaacctttttttggggggagggctacccatcacctcaagaatttgttgtttccttgtgttacaaatattccaactatacccttttagttatcttacaatgtatgacaaattactgtggactgtaatcactccattttaatatcaaatactagctcctatttattctagccaactatattttttataaccattaaccatccctatccatgttgttgcaaatgataggctctcattctttttatggctgaatagtactccattgtgtatgtgtacccacattttctttattcattcatctgtgatggatacttaggttgcttccaaatcttggttattgtgaatagtgctgcaataagcatgggagtgcaggtatatctctgatacactgatttcttttctttctgatatgtacttagtggtgagattgctagatcatatagtagctctattttcagttttttgaggaagcttcatactcttcaccatagtgattgtactaatttatgttcctaccgacagtgtatgagggttcccttttcttcacatccttggcagaatttgctgtttcttgtattttggataaaagccgttttaattgggacaagatgttatctcattgtagttttgatttgcatttctctgatgtatccatccattctcacactgccataaagatactaccttagactgggtaatttataaacaaaagaggcttaattgactcacagttccatgtgcctgaggaggcctcaggaaacttacaatcatggcagaaggtgaaggggaagtaaggtatgtcttacatggcagcaggagagagaagagggtgagccaggaagtgccacacccttaagccataagatctcctgagaactcagccatcaccatgagaacagcatgggggaaccttcccccataatccaatcacctcccaccaagttctcctccactgacatgtggggatcacaatttgagatgagatctgggtggggacacagagctaaaccacatcatctgatgaccaatgatattgagcaccttttcatatacctgtttaccatttgtatgtcttcttttgagaaatgtctattcagaccttttgcccactttttaatcagattattagattttttcctatagaactgtttgagttccttacatattctggtcattaatcccttgtcaaatggacattttgcaaatattttctctcattctgtgggttgtctcttcactttgttgattgtttgctttgctgctcaaaatcatttcaacttaatgtgatcccatgtgtccatttttacattggttgcctgtgctttgggcgtattactcaaaaaatctttgctcagatcaatgtcttagagaattttccaaatgttttcttttagaagttttatagctcgaggtcttagatttatgtattttatccatttcaatttgaattttttgtatagtgagagataggagtatggtttcatccttctgcatatgcgtgtctagttttcccagcaccatttattgaagagactattctttccccattgtatgttcttgacacctttattgaaaataagtttactctagatgtatggattttttagtaggttcaccattctgttccattggtctatgtgtctatttttatgccagtaccatgctgttttggttactatagctctgcagcataatttgaagtcagataatgtgattcctcctgttttgttctttttgctcaggatagctttggctattcaaggtcttctatggttcaatataaattttaggattttttttctttttctgtgaagaatgtcactgatattttgatgtagattatattgaatctccagatttctttgggtagtatgaacattttaacaattttgattcttctaatctatgaagatagaatatctttccattttctgtgtgttctctttaatttcttttatcaaggttttatagtttttattatagagatctttcacttctttggttaggtttatttcttatttttattatttgtagctattgtaagtgggattcattttctgatttcttttttgaattgttgttggcatatagaaatactactgatttttgtatgttgattttgtatcctgcaactttactgaatttgttttcagttcccattgtttttgatggaatctttagatttttccaaatataaaattatattatatgcaaacaagaataatttgatgtcttcctttccaattttaatacttgttatctcttttcttacattattgctctagcttgaaattacagtactatgctgaataacggtggtgacagtgagtatccttctgttgttctgtgtcttagagcaaagactttcagtttttcccacttcagtatgatattagcagtggatcagtcatttatggctctaattgtcctgagatatgttccttctatacccagttttccaagggttttaatcatgaagtggtgttgaattttattaagtgattcaagggatgttgaattttttcagcatcaattgaaatgataatatggttttggtccttcactctgtttatataatgtatctcactgattgattggcatatgtttaactatccttggatccctgagatacatcccagttggtcatgatgactaatctttttaatgtcttcttgtagttggtttgcaaatattttggtgagaattttcacttcagtgtttgtcagtgatattggcctatgatctatctatctatctatctatctatctatctatctatcatctatctatctttatctggttttggtagcaggataatattggctttgtagaatgggtctggaagtattcccttctcctatattttatgggataatgtaagtagaatcggtattagttcttctttaaatgtttggtaaaattttaacagtgaagccattgggtcccaggcttttctttgctgggagactttttcttatggcttcaatcttattacttgttattggtctgttcagactttggatttgttcatggttcaatcttggtaggttttatttgtctaggaatttatccatttcttctaagtcttccagtttattggcatataattactcagtaatttctaatgttcatttgaatttctgcagtgttgtttctaacatctcctttttcatctctcattttatttgggttttctctttgtttttagttgctctagctaaaattttgtcaattttgtttatttttttcaaaaaccaactttatgttttattgatatttttattgttttattgattttttattgttttcttcattttaattttatttattttcccctcatcttcattatttcttttcctctactaattataagtttggtttgcttttgcttttctaattatttaagatgcattttaggttgtttatttgaagtttttctacttttttgatgtgggtgtttacagctgagagctttcctctttgtactgtttttgttgtatcccataggctttggtatgttgtatttccaataacatttgtttcaaaaactttttcaattttcttcttaatttctttattggcccaatggccattcaggagtatattgtttaatttccatatgtttgtatactttccaaaattcctcttgttattgatttctagttgtattccactgtggtcagagaagatgaatatatatattcagcctctctatgtcttttgattggagagtttagttcatttgcattcaatgttattattaataagatcttactcctgccattttgttgttttctggttgtattgtgatcttttcttccttctttaattccttcctttcttcctcatatgaaggttattttctctgttggtacattttcacttttagttttcattctctgtgtatcattctttttctatttgatattaccatgaaacttgtaaataacatcttataactcattactttaaactgaagacaactacactgattttgcaaaaacaaacagaaaactaacaaaaactcttcacattaacttcatccccttatatttttaacattttgttgtttctatttctatcttattgtattgtgtatatctttaaaagtttttgtttttatttttttgtgtttgatccatctttcagtctttctactcaaggtatgaataatttacacatcacaattacagtgttataatattctgtgtttttctgtatacttactattaccagtgagttatataccatagctttaggtgatttcttgttgctcattaatgtccttttctttctgattaaagagcgcactttaacatttcctatagcacagatctgatgttgataaaatccctcagcttttgtttgtctgggaaagtctttttttttttcatatttgtaggatactttcacaggacatactattctagaataaaatattttttttcttcagcactttaaatatgtcatgccactctctcctggtctgtgaggtttccactgagagctctactaccaaatgtattagagcacctttgtatattatttcttttctcttgcttcttttagggtgcttgctttatcttttacctttgggagcttgattactaaatgtcttgaagtagtcttttggttaagtctgcttggtgttctataaccttcctgtgcttgaacattaatgtctttctctgggtttggaaagttctctgttattatccctttgaatgaactttctaactcaatctctctttttctctacttcctctttaaggccaataatttaaacttgcccttttgaggctattttccagatattgtatgtgtgctttattctttttttttttttttgtctgctctgtgtattttcaaatagcctgtattcaagcgcactgattatttcttctgcttgcagttctgttgagggactctgatgtattcttcagtttatcctttgaaacttttggtttcagaacttcttgatttttaaaaattatttcaattcctttcttaaattaatctaatacaattatgaattccttctctgtgctattttgaatttcattgagcttcctcaaaacaactatgttgaattctctgtctgaaaggtcatgtatctctgtcactctgggatcagtgccttatttagtttgttttgtgagaccatgctttcctgaatggtcttgatgcttgtggatgtttctcaatgtctgggcattgaatagttacgtgtttattcttatcttcatagtgtgggcttgtttgtatctatccttcttgggaaggctttccaagtatttaaagggaattgagtgttgtaatccaaatctttggtcactgtagcaacaactgcattagggagtatcctctgtgacaatgtgactcttatagattcatagatgtactgccttggtggtcttgggcaagatccaagataattccttggattaccaggcagagattctcttttttttttttttttttttgagatagagtctcactctgttgccaaggctggagtgcagtggcgcaatcttggctcactgcaacctccgcctcctgggttcgagctattctcctgcctcagcctcccaagtagctgggattagaggtgcctgctactacacctggctaattttttgtatttttagtagagatggggtttcaccgcattggccagggtggtctcaaactcctgaccttgtgatccgcctgcctcggcctgccaaagttctgggattacagacgtgagccaccacgcccagcctaccaggcagagattcttgttctgttcccttactttcttcccaaaaaatggaatatctctttccacggtaagctgcctggagctgggagaggggtgacacaaacacccttgtggccaccaccactgggaatgtactgggccagacctgaggccagcacagcactgggtcttgcccaaggcccataataaccactgcctggatactgccaatgttcattcaaggcccaagggctcttcagtcagtaggtggtgaatgcaccaggcttgtgtccttctcttcagggcagcaactttctctacccctagcccaggcaggtccaaaaatgtcatttgatttccaagccctggagttgggaatgcgaagtatctacctgttgctctattctactgcaactgagctggcacccaagttgcaagacaaagtccttctcattcttctctctgttttcctcaaaaaggactctctacctctgatcaccactgccccaggcctatggtgagtattgcctggctactgccaatgttcactcaaggcccaaaggttcttcagtcagcttataattaatgctgccaggcgtgagcctcttccttcagggtagtgggctccccagggcaagtgatgaaatgctgtttatgagccaaggctttcaattggagaccccaggagcctgcttgctgatctaccccactgtggtttgagctggtacccaagctgcaggacaaagtcccctctgctcttccttctcctttcctcaagcagaagcaatctttccccatggccattacatctgggaatgtgctgggttgaggctagtacatctcttgagtctcacccagggccctcagcaagcactacctggctacagctgatgtttatttaaaactccagagctctccagttgacagctgttaaatcctgccaggactcattgctccatttcaaagtagaaggcttccttctggcccaggttgtatctagaaatgtcatctaagacctagggcctagaataggggccttggattctgcctggcttattctactgtggctgagctgttatccaagttgcaagacaaatttctctttactcttttctctcttcaccccacacagagggaaatattctctcttagaaccatatgccacactgccaggggttggggagggtaacacgagcactcccatggccaacccagctattgtctcactagggcatgagcaccccaagtccactggctgcaagcccagcacagccagcactgggaattgcccaggatttgcagtctttgaggcctatatttcctttcaagtttatttagaaccccagagtgctttagcccatggtgatggggctaggaggaactcaacattctgaccactgggctggacaattctcctctgtctaaggttggtcaaaatgatccctctgtggatgtaggctgaattttgctgtttgctgatttccaccgagtcagaacagctctgagttccaatggaaagtcttacaaatctttgctctcccttccccaagcacacaggttctatctctgtgccacatagccactgctgagagatgggggaaggtgatctaaaactgtgtttcttaccatattcagtacctcatttcatgatatgatgttaaaaccaggtattgtgatcactcatctgatttttagttcttatgaaggcacttacttgtgtggataattggtcaatttggtgttcttagcagggaggaggatgattgctggaggattgtatttggccatcttgctccaccttctcctctcaattctccagacacagcaatcttaaaggtatatgcacatagacaatgaacttgtaaaatatataaaacataaaaagatataactgaaatgaaaaatgagacaaatttacaattatagatggagacatcagtacccttacctgaataattaataaaacaactagacagaaaatctgcaaggatgtagaataactcaaccataccaccaagcaacaggatctaattgacgtttatagaacacctaaccccaaaactgaagaatacacattcttttaaagtgctacctaacatatcctaggatacctaacgtattcctatctcaagatgccttatgtttgtgaacataaaacaagtctcaacaaagttaatagcactgaaactatatagagtgaatttattgaccacaatgaagtcaaactagaaatcaataacaaatacataccagaaaattcatcaaatacttggaaactaaagaacacactgctaaaaaaaaaattctatggatcactatagatccaataagcggaccctgatgacattaaaaaatagtaaggggatattgcgatgtattccacacataaatataacttagataaaataaaccagtttcttaaaaatacaaattattaatattacatcttactcaatatgagatagatgatttgaatagctgtgtaactattaagaaattgaattcataatttaaatgttttaaaaaatacgtctttaggtccagttcaatttgctggagaattttacaaaatgttatgagaagaattaacaccaattctgcactaccactttgagaatacataagaggtgagaataatttcccagatattttattaagtttatattaccctgaaaacataaatagacttacataaaagacaatacagaaaataaaactacagacccatacccttcattaatataaatgcaaaaagccttaacaaaatatttgcaaacataatccagcaatatataaaaataattatgcaccatgaccaactaaggcttatttcagggttgcaaagctggttcaattttcagaaattaattaatgtaactcagtatactggcagactaaagaagaaaacccttgtgatcctatcaactgaggcagaaaaggcatttggcaaaattcaaaagttgcttacgacaaaatatctcccaaaaataggaataaaggggaatatcatcagcttgatagaaacctttaaaaaccttacagttatggccaggcgcggtggttcacacctgtaatctcagcactttgggaagccgaggcaggtgcatcatgaggtcaggagatcaagaccatcctggccaacatagtgaaaccccatttctactaaaaatacaaaaattagctgatgtggtcgtgcgtgcctgtaatcccagctactcaggaggctgaggcaggagaattgcttgaactaggaactcggaggttgcagtgagcagaggtcacgccactatactccagcctggcaacagagtgacactctttctcaaaaaaaaaaaaaaaaaaacaaattacagctataataaagaaaaacttaatgattacattaatgatgaaaaacttaatgttttctctaagactaggaagaagacaatgatattagctttaaccctgctaattcaacacagtgctgtaagctctagctaatcaaaaaggcaagaataagaaataaaaagcagatatatgagaaagcaataagtaattagcattctgtattttcagataaaataattgtttaagtggaaaatcacaaggtgtctacaaaaatggggaaaaaaagggaaacttcctataatatgtcagtgagtttagcagggtcacaagatgcaatataaacataccgaaaaaatcagttgtgtttctttttttttcttttctttttttttacttttgagacagagtctagctctgttgctcaggctggattgcagaagcacagtcttggctcactgcaacctccacctcccaggttcaagcgattctcctgcctcagcctcccaagtagctgggattacagttgccctctagcatgcctggctaatttttgtatttttagtagagacagggtttcaccatgttggccaggctggtcttgaactcctgacttgggggatccacccaccttgacctcccaaagtgctgggattacaggtgtgaggcactgcgcctggccttgtgtttctttatatatgtaatgtgcacttgtacactgaaatttgaaatacaatgtcatttataattgctcaaaaatcaaatacttaaggtggaaatctagtgaaacgtgtgtaggagttgtatgctgaaaaatgcaattcaagattaagatggagagacaaacttcatgcccatattagaagattcaacatagttgacatggtttgtctctgtccccacctagatctcatcttgaattgtagctcccataatttctacttgctgtgggagggaccgggtgggagaaaattgaatcatgggggtggtttcccccatactgttcccatagtagtgaataagtctcatgagatatgatggtgctataagatgaaaccccttttgtttggctctcatttcttctcttgtctgccgccatgtgagatgtgcttttcactttccaccgtgattttgagtcctccctatccacgtgcaactgtgagtccattaaacctctttcttttgtaaattgcccagtcttggctatgtctttatcagcaatgtgaaaacagatgaatacaatagtaaagatgtcagtatcatccatattcatatacagatttaatgcaatttctaccaaaatccctgcaagaattttttgtagatttagacaatattgaataatcttgaaaacaaaaaataaggtgagatgaattagtctactcaattttaagaattacatagagtaatcaagactgtatgatattggcagagaatggacacacagatcaatgaaatggaatagagtctagtcatggacccacatacatatgtgaaacaattttggacaaaagactggattaagaaaatgtggcacatatacaccatggaatactatgcagccataaaaaatgatgagttcatgtcctttgtagggacatggatgaaattggaaatcatcattctcagtaaactatcgcaagaacaaaaaccaaacaccgcatattctcactcataggtgggaattgaacagtgagatcacatggacacaggaaggggaatatcacactctggggactgtggtggggtggggggaggggggagggatagcattgggagatatacctaatgctagatgacgagttagtgggtgcagtgcaccagcatggcacatgtatacatatgtaacctgcacaatgtgcacatgtaccctaaaacttaaagtataataaaaaaacaaacaaaaaaaacaaacaaacaaaacaaaacaaaacaaaacaaaagttcaaaaccaattcaatggaagaaggagagccttttcaatatatgatgctgagctaattggatatcaacaagtgaaaaatgagctcagacttaagtcacatactttacaaaaattaaaatcacaggcttaaatgtacaacctgaaactatacagtttgtagaaaaatagaacattttcaacatctagagttttcaacatctagagttaggcaaaaaggctatatagacttgatactaaaagcagtttatgaaaggaaaaaattgataataggacctcaacaaaattaaatactcttgttctgcaaaattctatcctaagagaatggaaagacaagctaaagaccacgataaaatatctgcaagtcacatctgacaaatgatggggatgttcaaaactgaatgttcaaaacttagcattaaaaaaaatcttagaaaatggaccaaaaaccacagtgatgcattttaccagagaatatacaaatgagaaataaacacataaaatttgcttttattaagaaaatagaaattaaaaacacaatgtgataaattatacacagtgattaattattattttacagtgatgaaacccaatactggcaaagatgcagagaaactagatcactcatatattgctagtggaatttcttaaataacagaatatgaaaccaccatatgagcagtaattgcatgtctgaacagttatcccagagaaaataaaacatgatcagatcagaacctgtacataatgcttatagtagctttattcatgatagtccccaataaaagataacccagatgttcttcaacaggtgaatggttgaacaaactggtggatcccttatatattactcatcaataaatagaaatgggcttctgatacacgcaaccacctgcatgaatctctagagaaatatgtggagtgaaaaatgacagttctaaaagcctatatactgtatgattccatttgcatggcattctagaaagtacataattatataaatagatagcagattagtggttgccacgagttatgaagggttatatttgtgggaggaaagtggatgtggttataaaacagccgtattgtggtgatagaattgttccgtatcttgactgtatcaatgtcaatattctggttatgataatgatgacctacagatctgcaatatgttaccaaaggggaaactgggtaaatgttacaggggaaatatccctattattcttcacaactctgcaaatctatacttacgagaaataaaaaagtttgattagaccactatactatcttgaatcttaacacattgtgcaaataaattaattcaaaccaactgatatttattgactttattagctatattgttagttgctgccaggggcctaatgatatatgtgaggatctgactgctacaaaattatttgtctaccatacaaagcatggaagacccattgccttgagtcaataacaagctgaaaaacttgtccttagtcccaattgtagcatttacctcactagcagaagaattaacatgggcatgtacttttaagatttttgggtgcttccagattactcttgatcacatggaagtgaccttttccaactttccccaagctggactaattacagccatttgtcgcttaatgatggggatacattctaagaaatgtgtcatgttgttaggcaattttatccttgtttgaatctcatagtgtgtatttacagaaagaaacctagattaatggcctactgcacacctaggctatatggtatatggcctattgctcctaggatacaaacctgtacagcatgttactgtattgaatactgtaggcaattgttacacaatggtatttgtgtgtctagacattaaaaaggtatagtaaaagcaatattataatcatatatatgtacatatatatgcatgtgtgtatgtattttctagttgatttattccttatatgtaaactttagcttctttttgttaagaaatagtcttaagtgataaatagcagagacccatctggggtcagagtgactggttgagatcctgattaagctactcactagtcatgtgacattggacaggtcacttaacctccctttttctttccacatctgataaatgagaataaaaataagcactatctctgaggattgatagaagaatcaaatgaagtagtattataaagcacacagaacactgttctaaacaggtgttaaataaattcacaatttggccttggataatttcttctgactctgtgaaatgaaagtcagtgaaataaatacactctcactttttcataacttctagtccaacaaatatacttacagatttatatgcttagctgcaaaatgatcataaacaatttgagtacttttataagggaaaaatgaggttaaaataataactcctgtaaaacacatgatgtgaatgcttcaatgtgtcaaaatgctgtttttcatttaaacatttagataatttttttctaatttccatccacatgtgtcagaatgaaacctcacaggctatattttactaaaattattttgtaggtgtcaagaatgtggacgcttgaattcaatctatctactgaagattatctgtttgccagcagccccaccttgcaccacttttagaatcagtgaactctctgggggatatttttttaaaaattaactgatgtatttaattagagaaacagaataaagatatttttcaaaaataatgcatacaattactcaaaattctagacatgacatttgtgctgttgatttgctgaacagcacagttgataatcagaaaatttggaccccctcgctgtcgacttagaacaatgtcgtttcttagggtgacagcagaatggatgcttaaagataataaattcattcatcttaccttcctcacatttcaagtgaataatgaaatgtgagtaagtgactcaaaaagataaacttaaactcaccaccagatgtctccactttgtaaggcaattaaccaaacaaaaaagaggtgattcaaagggagggttgatttaaggcagtgttcttgtgtgcagtgatttgttccccctggcatatcgggtactaccgtctttcagtgggtagaagccagtgttgcctgtaaatattctacaatgaacagaacagccctccgtaacaaagaaccatctaacccagaacatcaaaacattttttatgtgagattataaaagattataagaaaaaacaggtatgaaactaaaccctgttttctcccagcaccctctagatatctctattatatgcccaataacataacattctttattaatgtaatatcatttccgttttacttgagtgtcatcctcaccaggtgatgatgtcttattgagaacctgaccaaggtcatttctatctctgtatgcctactgcttcctagagtgtgtggcatgtggtacacactccatagcttgtcaaatgaatgatttcatgaattaatcataataaggtatagactataagtggagcaagaataaactctacattgaagaaagatgtgtttcagaatctgtcaatcccaagtgtaatggaagctggtggcattagcaagcagccagggcctagtggtaacaggtggtgtaggttgttagaaggaaaacggagacgttagcaaaattttgaaggaggatgccaggcaagaacattatacacaattgagttgttcggaattccttcttgaaaaaactaaaacttttatttagattaaaatataaaattgctggatggtacttggcaataccatccagccatttcatattttaatctaaataaaaaacttcaaacaggattgtcaaaagaactgattgatggtcaacactaaatgtatatctgtgtgtattgattcaaatgtaaataccaaattaataataactataaaatttggagtaggtaaaataataaaactgaaaaagtaaaaatactgtaatgaataataagttagaaggtttcagaggaaattaaaagaagtgttagatttcttttttttttttttttttttttttgagacggagtctcgctctgtcgcccaggccggactgcggactgcagtggcgccatctcggctcactgcaagctccgcttcccgggttcacgccattctcctgcctcagcctccccagtagctgggactacaggcgcccgccaccgcgcccggctaattttttgtatttttagtagagacggggtttcaccttgttagccaggatggtctcaatctcctgacctcatgatccacccgcctcggcctcccaaagtgctgggattacaggtagatttcttaactatgcagttgaatatatcacagctgtaaaattgtaggttaaaataactacaaattcttagtgtcatttacaattttttttctaaattttggggagatgagagaaactatattttggagggtagaatcatttattttcatttaaataactatatttatattgagtattattctgttaaatttgacaaaatattcaatattttgtattttaaaatcatccaaaacataacatttccctggagcttttctttttttttcttccaatcatcacccactaacccattcaaccacctatccatgtaggtttataggaagatacttggaatgctgtttgtgccatgttacttatgctatttttgcgtggttgaatttggagctatttttaaattttatattttcgttttttcacagactatttatttataatgagcattattgatttagagaaaacaatgtactacacatctttgttttaaactttttttttaatttactcagtctactgattcaaatgttgatctcttctgaaaataccctcatgggcacacccagaaataatatttgataagccatcttggcattccttagcttagtcaaactgacataaaatcaactattacaagtgcttaattatgagtagtagcagtgtaaataatatcttttcttgtattctgtcatactttttattttaaaaagttacattttccatgaggagaaaacatttagtagttcattctgcagaatctatgtagaaaggacttctatcattccttcagaagacaactgctagaacagaaaaaaaattgaggaaacacagaacacagaccttcatttctgcttctcttttctttggctgaatcccaaacagctaagcccagtaatattggcttggacaaccagatgttctctttcacttgtactctctctttgacttctgggctaagtggtaactttgtggagtcttaagagaagtatggagttgggggaaaattacttagaaacaaaatcaaaggaagccacaaaagtaaaaaccgcatctgtcataaaggaatgtaacaaagcttgcaaactctggaatgatgaagaggcagcaggctttgtgctgagttcagtcatttctctcagctattaaatattgtcaagtatctgtgctccttcttgactctaaatgaagcttccttcactccctttagattcatttattatgcagtgagacattttttttttctttggaagaagggactaatatacttgcacaggccagcttttgtttatttgtctgcaccaacaaacttgcaaaatcgtcctcttgaaaaggtaaaatcacctatgcataaatttcacctggaaaattactgcttgttacaaatgtgaaatacatagactgtctaaggcaaagctactgaaagcttcattcttaaggacatcaacttacgctgagtataaaataatactggagaaatttgccaagtttaattgggaattttaaaaaatcaaatcacctctaaataattatataaggtatgagttaactggatacttggagaatcctcttcttcactgaaagagatgagatcctatgactctaagcttaaaacccttcactggatgctgatggcacctggttcctaaggaggccattgcaggtccaaagtgaggtgaggaaacgaaggagaatggaagggggtttccatgaagctagattttttcccaatctaatatatttatggtttgccaaataatgctgtcctcctccctgccaacacacacaccaagtacccacttcttaatccccagaacctgagctcgattactgtgttatcttccatggcaaagggactttgcagatgggattaagttaaagccatggaggcagggaatttatcttggattattcaaatggggctacatgaatcctttaaagtggagaacatctctcagttttcgtcagagaaagggatgtgattatggaaaggggatcagagtgatctgatgtgaaagggacttatctatcccatccttgctggcttcccatggaggaaggcaccatgaaccatggtataagagcagcctctgcaagccggaaaaggcaagaaacaaagttcctcctagagctttcagaatggagtgcagccctgtcgacaccttggttttagctgagggagacccatgtccgaactgtgatcacaaatactgtacgataataaagttgtgctactttaaaccatgaagtttgtggtaatttgttatggcagcaacagaaaactaatacaatatttttattgttttttgtttgggcggtggtgttatttctagtttatttcttccttgccaaaatgaaatataattatcctgtgttaatcccctaatctgaattctccactccttctgccttacatgtacctcttcctcctttcttccctttcttcttttttaaaaattgtgttatgaaatttaactgttgacacatagaataaactccctggttcttgtccatgacgcattctatgtatggctcttctaatccggtccctccttccagttgcatgcccacccccaactctttaacctctaatacggtaaatctcagacttcccagtgatcacaattcctctggtacttgtgaagatgcacacgcccacttcccaccatgcacctgctgaatcagcatctcccagagagggatctgaaaatctatgtatttagcaaggcatatagtcatttgttaattatgagaaacaccattttattagcagcaccaaacctaatatcccctgtatgtgctatgccctccccacaacccattcatgcctctaatcaggtttccttctgctagaattccctcactcctctccttcttcccattctggttccttccctgactttaccaggccatcttctcttcctaattgatgttatttgatccggattctcacttcctgtgagtcccctagctgaccctctatcttcaaatcatgtagagcattcacataaatgatgatggctgcatttaccatattgtcctgtaatcatctgtttgtcagtctttcttcatcagcaagattgtgtccttggatgcagggattgtgccttgctcatttttctcctctaaggcccagcaggtgctgaagatgtattagatgctaagcaagtgctttcaagaggaatgagtgaaagaatggtcacaggaatgaattaaatactaaaggcatcacataatgagctaattctctactttctcttttttaagcaccatgctcctttcagttaatagcctaaggggattcaatttagagagcctgtcacaaatgtccatatgagaaaggaaatctggtgtgtggggtttctgggttagaaagaaagaagtcatgctatgccaactttaccttcaaaatgtatttcacttattactaaacacttctcacaactccatggacagcatgctggtccaagtgtctgtcatttctttggcctcacagtggttcttgaatataataagcacaggggcttttgccctggctattccctctgtcctagatagtatttatatacggtggtatatgtatcatggctcaattcctctcggagagggtttgtctaagtgacctatctcaaatattgctcctatcacaagtggtttaatttaccctgctatattctttattttctctatagtgcttatataggatgtatattgtacatttttttctatcttgctaataagaatataagttccatgaaggcagaaattttgtctgctgtattcactgttctatccccaggacttagaatcattccatgtatacagcaggtgttcagtacagatctgttggatgttgaatacgggtgtggcagaatattccagtagaaccaagcagcctagtcattacataatacaaggtgcgatacatgcatacactcatcccacccaggacacatcagacatcttaaggtggcattttaaatgcaccttaatttatatctgcaattgctaagacacaaaaatttaatgaatattttcttccatgttttttttacgtctatttcctcagaaagcatgggagattttgcctgtccgttgttgccatcgttttcccttgttaaagtagtcccccaacctactgcccgttgcagcctgagggaacaaggctgggtttttgtggatgatggtgtcctgacgcaggtccactttagtttttcctattcctatggtgatgctgctgaggaccaattaaaaataaacaaattggggcaggcacggtggctcacccctgtaatcccagcactttgggaggctgaggcgggcggatcacgagatcaggagatcgagaccatcctggctaacacggtgaaaccccatctctactaaaaatacaaaaaattagccgggcgtggtggtgggcgcctgtagtcccagctactcgggaggctgaggcaggagaatggcgtgaacccgagaggcagagcttgcagtgagctgagatcacaccactggactccagcctgggtgacagactgagactccacctcaaataaaaaaaaaaaaatagttagaggtgtgccctgagccattggagtggcaggcatggaatctcatttaacttttacaacagagccatttgttccttgtccagcctcccccagaatgccgtcttggtttgaattcctggagcggtgtggggcaaccatctgtatgacgtgaccccaggaattgtttttcaactgcatgatatctctgttatatcacgtctagaactttgctaacttcaggcatggtattatcttcctacctaggagtctctcacttcattttgctcatgccctggagggatttctgaactctgatccagttttttttccctcaccttgaagtgttttttttttccttctaatactataaatgtagcaattgtagtcttgtctcttatatgttgatttcaattctttgttttccccagtttttcttttctatctttgacggcttgagatttttttctaatccgcaagagtaaaatatatactccagcgaccactgtcataggctacgtggttttctgttttgaggttttgagttacatttctgttgcttcctggtcaactctgtacatctcatggccctgatgacatggtagtcaccgtgtcgtaggtatcctgttcatttgctgggcaggaacagctgtcagacagtacatttgatggcttttcacagaatcagtcctgcctttgaaattatattctaaaagctcttagatgtccatatccacatttctttgcctgaaaagagaataaaagggaagaaaaaatatgttggatatatcaaaacgcatcaattctttcttccctcacccatcctttccatctccaagtgcactgtccacaatatgtccacaatatggacatgtgctttgaactcatatggctgggaagaatagaagggaagtggatgtaatcttgcctgagaccatggttatcacagggtgaaagcaggatgagtctgggctatcagaaaacccaaagtcagtgtatgctaatctaaggtgactaacctgtcctagttttcttgagattttcccagttttagcacaggaattcatgtcttgagaaaaacaggatgatttatcgccctacagaatcattcaaacacaactctaagtgcctactctgtgcccagcattgcccttcaggtaacttgtggtttggtcagccagtcccgtagcctgtcctcatctgcatttgtctttcttatgtttccataaacctttagaggttgcccttgtgttaacaatttcacattcatgcctgggcttggtcgtcctgaatgtttgaccctgttaatttgattttattctctgacacgaacttgggctgccataaatccaaaatgaaaatgctgtttggagtcacaatgaaaatggaatgcgagaagattctagagaagacaaaataacccaaagaaaagaagtatggaaggcaggggtagcaaggcggagctgtgccctgtcacggcacacagagaatgcccatggattttcacaaatgctgttaaaatgtgaaaagaaggtgtttcttttttcttcaatctgagcttcaagctaatatgggcattcagctaaatccctcctgggtcctgaaacagtatgtggttttggatttcaaaggtaattattgctgaattcattgtatggccagtgcacctgccaggtagacattataaaagagcatgcagggggccaccaagagaatttggaggacaatttctccatcacaaaacccctttgaaagcctattaaggcatcaagtgccaggaatggagttgaacatattcataatacagttaacaatgcaaatgaagcaacagttccaggtcggagaaaatgccgatgcttacctgagaaattcgggctccattgtattgtgtctgtcctgcaattgactcacagtgagttatcttgtagaaaagtggcatatttgcatatttagatcctgcctgggataagcaagagaaatacatgttctggctttctgaaatgaaattgagagagaaaaagggggcacatattgctcaatatgctcatttattcattaaaaatacaagtatgtacatctctcaggccttcattgggcaactgcccttgggagaaaatagagacaaataagaataataaaaagccagcagccctgtcctgatggaacttaagatctagtgggagaatcagaaataaattgaataattacccacgttaatataaaattgcaaatgtaataagaccctcaagaagaggtaccaggatttctgaaagcacagagtagaagaatttgaaccagttggggacttccctgagaaactgaaattaggctgaggtgggcagtgttcacacttgctcgctgcctaatctgggacagcactgccgacagcttgacctgcatttctccaagtctccacaactaattttgtaggtagacattgtcccttcacaccctcaataatcttatgagaagtgtttaataaccttaggaagaatactccaccattgtcagtaaccgtaaggggaatggcccatcaccctcagtaaccttaggagaaatatcccgtcataatcagtaacctaaggaagaatattttattacagtcctagactagaggcttcctgaacaacctctcttttgtacctctgtaactattcctgtactgcaaaagtccaaatcctgcatagagtagcaactcagatattagtcaaattaatttatttattcccaccctacagatttgaaaaatgtggcctagaaaggttaactagtgtgctgaaagccatatagctagtaagaggcagagccatgatcactaccaagctctctgtgtccagaataaaagggagtggcattcagattagagggcacagcaagagcctcatgcatattcctgcaaaggacaaggatttgctgcctttcctgtacatccctaaagagaaggaccttcaactcctccttctggtcacgtgtatttcccctgaaagcagaacctaggcagtgttttttgccttcatggtcaagaaacacatgtcagcaaatggtagagagagggttgtgctgctttgagacacgggctcccaagatcgcctatcttgctgataaaagtacagataagcctgtcagataagcctcctgctgcaatgactgaggtctccagctctggattgcttgctgtggacaattcctcttggaaagctgtgcaagcaccttttgaaaaccacacaacactgagaagcttccttccagcagaagcacaaaaactggaaaccttgaggcttcacccatgtggattaagtaaaatgttttaagtgactcggaggctacttataaaaaacaatttacataaattgatgttctattcgaagagggtagagagggtggttttaattttttcaaaactttcctcttagttttaatagtggcagtggcctcgaagaagcaactccttttaataaaacatgcttgtaaatttattgagacagactccagttgaccctatttcaggcgaacctctggggcctcccacatacagctgtcatgagtgctgaggagcctgggatttgagttgctggaggagtccattctccatgactcatgctttctgggctctgagatgctccaattcatttcagggtatttaatttctaagagtattcaaggttttgttgaagatctaaacagtgcttagaaatttttaccctggtttaccttgatgaaaatgaacctgggaggactgaggtgcaagcatacaataatcacacacacacaaaagacaaatactaagctcatccatgtggcccagacaggaaaaatgtcataaatataaaatcatggattataatgtggttacatatagttacttattttattgtccttgtttttttaagaggtgatatgtgaatatggtaaatattttaaacagattaaaattattttctaattagagataattctctctccttctctctcatgtcacccagttttccatttaccctccaaaaagatagcaacataatgaatttcttctagactcttccagaaatatgtgttgtccatttaaacatatattttccatcctctaacatatacttttatacatggatatagtatgtggacagtattatgcattttgatttttagttaataataaatcttttgaggtacccacttcaataataataataacaacagcagcaaacaaacccatatagagtatgtgtctaaacctggcacttttctaaattattttcagataatccctacaacttctgggagaggtgcaagtatcaaccagttggagacacagggaaagggtgatataatgcagaaagtgacttgaacaaatttacacagaaggcagtgaagtgtgattcaaattcaagcagtctagactgtgccccacacaactctgcagcataaccttgcagtatgaaaataatgcctctcatgcaggtatgccttattctttttaagagctgcataatattcctttgcatggatgtatcattgatttattttgttcactgttagtgatgtcttagactttttcctacagtttgccattgtgagcaatgtttcaatttttgaatatttcaccacgcttttgaacccatactaaccgcacatatttgtaaaatcaattaatcaatttatagtagtagatttataggctttttaaacaccaaaagctaattttcttcttactagtagggagatatggatgggacttactgaaacaagtcatataatgcatctctattcttgcagccaaatgaaaatggccccatcaaagtgcaagtgctcactaaatattcgttaaatgaaagaattaaatagaaaaagctaccatttaaaaacattatcacaatgctaaaaatatgttgatttataagatctcattaagttcatgcaattaaagcaaccattatcctcattttacagatcagggatatgagatccagtgacttacccaaagtttcaaaggaaagatgtaacagagccatctctgaacttctgctcttgggaatctacacactctttccactagttctgaccttagcaggtgtttgacccaggacttgcccaacttggtttccatttgtatagaactaatgccaaatttcaaaagaaaatattacataccataatcaataaaaacaaaatatcaaacatgtattatgtgggaaagactgagataaatacttggcattgcattacctcaatactgttggcaaccttcctacgagcctcatgcaattactgctaccactttgcagatgagaaaaagaaaactgatgctaagcaaagtttagtaacttgcccaatatcacaagaagtagtgagtgacagaggaagacttagctcacatctgagtgtctccaaatcccaaatcccaaagcctcatgctctacctttttactggaagttaaaataaatattatgacagatacctttttaaaaccttaaagatgatatgtattggtcgtactgattcctgaatgcatctgtatttcctaaggcttttctgtcctttattttcaagagtcttccatatacctcttagggaatctgtctcagctagtattataatgagaactatcatatagcaaatatttagctgcttaataaataactacatattttttaaaaaatgacaaactcacgagaattggcctttacttaataatcacaaacaccaagcttatgaatatttcatgctcactgctttctgctgagagcgtgagcatcctgcatttctatagctccagattatgcagggagcaatggaaaccatatgttttgtgtgttttctttaacaatttgatgatggaagaacacctggcagtgttggagataatgtaagaaatggtcgccttttgttatttgagtgcttgaaataaaaatctcaaatggcaagttgtaatccaaaccacagtaattatagaagacagtacaaaaaggtatacattttaaattcatacatctaaatgagtctatctgcaagtaagtaaactgtattcaattttccacagcaactaccccatcaacactatcacccaaaacactgatgacatggtactgctcaaatgttggaaactttcagttttgagttcaattgtttctttctttgttctttcctttcttccttcaatcaatgaatgttagagttgtttttaagtgatctcaggaagtacacagttcaatgaatatgaggagtaagaaacctaaatgaaggataggaagacagagaagtcttcctctaagacggaatgtttaaatctggatgaggggattggtaagagtttaccaggcagaagggtagaactcagaggaggttacaggcatgggaataactcacagaaagaagcaggtactttctagacatcggagggaagccagagtggcaattgcgtagtgacaaggggagtggcaacatgaggctggcagaagcagataatgcagagccttgtaaagcttgataaagagtttgaacattcgctcaagaacagtcagaagccattgaagggtgtgaagctagtgagagacagaatctgactcaggattgtcaagattattctggatgaggggagacaggaagaggaagggagagaggtaacttaggacataagtgtagtaattcagataaaatattatgttggcctggagacctggtccggaagagtgacagtgagctggaaagaggtgggtggactggagagatattacaaaaatgaaatatacagacaagagtgattgatcaggtgttggcagtgaaagaggaagatgtcaagactgacttagagatgcatgacttgacaagctgcagacatggagatccgttttgaactttatgacattatttcaaaattctctattttctctcctgggaatatttagcaaaaagaaaaaagcctgtagaccattttcaaattgtgcttaatcaagccaagacttgtgcccacctcttcagggtgaggaacgccctctgtgttcattttactgctctattttcagtgcctggtgtagcatagggagggatagagtaggtgtccaatcatgagtctatactaggagatgagatgtgttcctagctgggttataagaatcttgaggaggaaggcttccctgtctttatcctccatttttttctgtccttctttatttccttctaaactttttcctaagttactcatttgtgagttattttacagagttaaacaaattgatactaaagtccatatgggaaaacaaatattatgaataaccagaaaaaaaaaataatagaaaagaaaggtgttctttcttttctgaaagacagtagccctagagcagggctctaggcggagtagccctagaagacattaaaacacactataaagtcactatacttaaatcaacatggttcgggtacatgaataaactaatagaccagtgggatagaagggaagacccacagatagtcccaagtatccatgaaaatttattatataataaaggtagcatctcaaagcattgaggtaaagaagaaaattttaataaatggtgttggggcaactgggtagccacttggaaaaaagtaaaattaggtccatattttacactatatacaagaatagactccaaataacacccaaattttttaaagtgagactatgcaagtactagaagaaaacatgggcaaactccactttaaccatgctgcagagaaagactttgtaattatgactgcctatccaaatgcaatacgggaaaacatggatatattttactaatgaaaaaataactacatgaaaaagcaaacaaaacaaaaatgaagtcaaaagacaactgaaaactgggagaaaatatgtacaacatacgctacaaatgaagcactaatataggcattttatatatatatatatgaataattcttaaaatttgagggcaaaaagaaaaaaaatctgatttttttaaaatgagggatgacaggaacaattacggaaacatacaaagatgcaaaaatgttcttgaaacatatgaaggaccaatcactcatagtttgagaaatgaaaataaaaatactgacatgcaatttatcacctatcagcctggcaaaaattaaacgtgtgtcaatacactctgttgttgaggctatggggagacaggaattctcacactttgctgatgggaacacctagcggtgcaacccctcaagagaggaattcggcaaaatctaacaaaactccacatgcctacaacttttgcactgcagttccccttctaggaacctaccctgaaggtacattcccagcaatatgaaaacactatacactgggttattcatggcagtcttgatcataatgcaaacatttggaaacaacctaaatgcccgtacataggagagcacttgaataaacaatggcacatccgtaaagtggagtattgtgcagctgtaagaagaatgaggcagagttctacaaactggcttgaagtgatttccagaatctactgtcaggtgaaagtagcaaaattcagaaaattatctatagtaaattgtccttcaagtagaaaaaaataggctacaagaaaatatacattcatctgctcatgtgtgcaaaagaaatgcaggctggataaacaagaaattatagattggttatctccatggggtgggtgggaaaatgctggaaaggagaatgagaacagggtagcaggaatatggagaggagacacttctctaagtataccttatggtattgttttgacttctagaatcttgaaaaaaaacacacaccaaaaaaaccatataagaaaaaaaaaaaaaatggaaccaaacatacagaaaaaccaacaggatgtgagaggaatccagcacagaatacaaataggaatacatgaagctaactgtcggacaaatgaataatgtcgcctcattgaagggggtgaggaagaaaataactcactgaagtaactttagaaaacagaactgtgagtggctatcataaggctaaaggcaaaaagaaatgttgaaacatgctgggctttagtttgtaaatctgtttctcacaaaagtatgagtaagcaattcagaaatcctgttatgtatgaagtaggattaaataaataagtaaatagattgtagataatgagtgccaagtttctcacttctaaagaaagaatttacaaatcaagagagaaaggaaaggaagaagaagaaggaggtggagaggtaggggagggagaacgaaaggaaaagaaagactcgcagattaccacacttaaacttgtagccccattcctaacatgggaactgcccattccttttccttattttgcttttctagatagtatttattacttttcaagtacacagtaaatacttaccacgattgactggttgattgcctggcacttaagttccacaaagcagagattattgtctgttttgctcacctttccattcctagtacatagaacagtgtctttctagagtaatagatgcttaataaatatgtgttaaataaaacataaaatatgctttattgctttttttatttcctgtttattttttatgtcaactctgtatgtatatgtacacacacatatatgtgcatatgtatttgtgtgtgtatatatgcatatttgtttgcccatatataattttctctagagatccagaaattataaatcatctttcaaaatctagtaggaaaatgtttcccagttttagaatacatcaaacacttctgcaatatgctaaacgccagattctgggctttcattcccataatctgattcgggatgtgtaatatagggctcaagaatttacattttaaaaataaacattttggatgattctaatctaggttatcagtagctacagattgacagcatcaacttaattagctgttgatgggctgctcagtagaggactgatcccagtctgtgtggtgagagctgggagagagagggaagacccagacctgacagcggtgaagtatatccactgtcagtaaggaatggggaataaatcattccaggcagagaaagaggcactggtatagcttcagaatggacagagggagggagtagattcacagacataatgtccatagaggcataacggcaagttctctgcaggtgaaagtacggatgacagaggtgctgggctgggggacagtgtcccggaagctttgttgttggggtgcaatgaagagcatgtgggaagcatccatctggaatgagagcacactgggaatgtctaaaaatggaaagcagcacatatggtgaaggtcttcacgtaaagtggtgatcaatgctggagaagcccatagttggtcctaatcatgagccttcaggtttggaaagatgctgatgccattcctggtggtgggcaaactccaaagggatgtgtccatatgtgattttggaaatgagactgacaggactgtgaaaaaccagacagagctagaaatatcttcagaatttcaacatcatctctctctcaggggcaatttttttctatcattttctaataacaatatcatacataggcatacaatgagtatatttgttataagacaaaatgggacctgatattattaataaataaaaacatcttaggatgattaaatttttttttaaaaaaattacagaattaagttaaagaaaagaagtgttttcccacagtagttggcatgatataacccaagggtcaacacatttattctgtagggacagtaagtaaatatttcaagctttatggaccaagaggcaaaatcaaagctattattaggtacttttatcaaaacagagataacagattttggcaaaaaaaaatgataaaatatacaatatgaaaataacaattttgtcattaaacattattaataaggtattagagtgaattttttataatatgcaactaataattacagaaatataattttttgggggataacattttgcttaattaggatcgaagttagtgttccctgtcatatcaattgcatgtgttcctatgtatgatcccttcttagttcaacaaaaatagggggcaagtgggatattgccctggtgccatagcttgctgaccccttatctgatccatacctaacactgatctgacccatgcctacccccttaaagcttatcatattgggccgggtgcggtggttcacacctggaatcatagcactttaggaagctgagacgggctgacggcttaagcccaggagttcgagaccagcttgggcaacacagaaagacctcgtctctaccccaaaaaaaaaaaaaaaaaaaaaaaaaaaaaaatccaggcatagtggcgcatgactgaggtctcagctactcgggaggctgatcgctggagtctgggagatggagaggttgcagtaagacgtgatgacaccactgtactccggcctgggtggtaagtgagaccctgtctcaaaaacaaacaaacaaacaaacaaaaaaaacccctctcagatcacatgctgaagaacaactgcttctgagaataaaaagttttctattctataaagaaaacctatcctaacacagaaaacccattgattactggtgatggtaaaacacaagtgacttagtataaaaacttagtacaaaggatgttaggtatatgaagaaatgaaaagggaaagtgaggctaaaatcagaagagattctaaaagcgtagccatcacaagcttaggagagaaaattagccacctttccagacactgcagtgaagagaaaacttataaattagatttataggggagtaacttcaacagggacaaaatataaacagaaaaaacaaagtcaagtaccacttgtaactaaccttgaacagatcaaccctgatgaattaagtagcctacctacagtatgtgtctctctagcaatgattaactactgaattgaaaatgaatttatgtgaaattgaggatgcctatgttcaagagcaacatatattaaaacttttgtagaatagcacttcatatgaaattcaaattagaaaaacttttgcttcctctcggtgaagtaggtaaaggatatttcaaaatcattcaagttcttgctttgcttaaaaatcatttgaacaatttttaattaatttgtaaatatcaaaagtgagaaaatatagtctacaatccaatttccctaactattcaaccacctccatggtctgtacaatgttcatctccttgttttatgcatgtaaaatatggttatgataatcactaccataaataattttgtattctgcgtttcttactgtatattgcagacattcctaggttgctttatcatcattattgttctcatattttatgacaattcagtagtccatattgacattacatgttattgttcatttttatgcttttcctagtttttctttattaaaatagtattaaagctttttacttcattttggaataaaaacagtttaaatgtgttgttctattgtaaaaattagtttgaaatagtatcaatataggaagaaaattacccacaaatgtcattctgaaaacaccaatactttcaattatttatgtgcatcttcaatttcatatcataaaataacaatatagctagagcattgttttctatactttccattaacattatgcccaaaactttctttcatttttctttagtgacttgtggttttctttatttttatttatttatttattttttatttattttttttttaatttttttaattttttattttattttattttttcgagacagaatcttgctctgttacccaggctggagtgcagtggtgcaatctcggctcacttcaagctccgcctcccaggttcatgccattctcctgcctcagcctcccaagtagctgggactacagacgcctgccaccacacctggctaaatttttgtatttttagtagagacggggtttcaccatgttagccaggatggtctcgatctcctgacctcatgatccacccgccttggcctccgaaagtgctgagattacaggcgtgagccaccacgcccggcggttttcttttactttacctacagttactgttactcacactatcctatattgttttctttaggtaattttttgttctatgaaatcaatgctctgatgaacttgtgtcctggtgtgttaaccatctcgtcttgctggaatataagtatcataaggacaaggacatggtttgtctggtctcctactgtctgcacagggcttagaatggtgtcaagcccagactgagtacttaactaataattgtggatgaatgactaaatgaaaactagagcctttgcagagtaagaggtagagacatatttttgtatcctgaaaccctcattccagagctattctcctatacaaaatgaaagaataacctgtgtgctattttcttctctgccattccctcaatgggattgaaatgtaagtctttgtttcttaaaataactttttaaggttacaaaggacttcatagtaaatcttccaaatccctccagaaactggaaaagtttagttcccagtatctagcagtaaactaagggcagtctatggatgcttagtggtgatcaactataaatattatgacatactatttatgacacttaacattcacttatgatattacattataatatttatactgtcaaaaaaggatatgaactttgaagccaccctggtagatgacttaatctcagttttgctaattaccagctgcctaactttatgcaaattacttgctcctctgtacctcagggaagcaaaatagggcaaaataataatgcacttttagatggttgtggtgaggactaaggattaagcaaattgatataaataccacaaatatatatatatatggtttttatatatatgttatatatatggtgttttatatatatatatatatatgaaatagtcctttgtatatagaaaacactccttgaatattaactatcatcatcaccattatcaccatcatcagcaccatcaccatcatcaaccatcattatcattacataatggtcaccagttgtgcaaggcccaagtaactttttacttataaaattaaaatctcaaaatttacaaagtatttctttaaacatatagggcatgtcaaggctatgctttgaatattcctcttacttgtttgcattctaataaggtctcttgagtgggagataaagggaaaaatgatcaactttctgctggaaatggtgcataaccctgagtttgaaagtgcaaatgcattactcacgtgaatgtcatttatcgtatgtgttgaggtggggtggagagggagtgtgttaagtgctgcttcttttgaccataaaattccagaggacaaattatgtaaattctcatggagctcaagagagtgtcctgccaaccaatgaacataataaatcttgttggtgctgtaatgaagacacttaagcttctgataaaatgacttctttcttcagaagattccttcaggaccaaaggcttcccttgaaggtgaaggggatatatgtttttactgagacttataaattaagtgaaaaaaattctatctgagtcaatgaaatactcttgtttcatacacaggggcactcatgggctctggcacattctctttcatatgcagcacctgctggaaatcttttagtataaagcacaacttttgtattgattttcctcccaccttcttaaacttcttcttctacatacttattaagtaatgatgagttggtaaaatcttaacacaaattaaggacatgtaatgatcagaaagataattgcaatcactactttttgtggatataacccacaccacagataaaaaacattaaccacagtagttttctcacggagatagtagtaaacatagcctatgctgggctgcaataccctaacatctcagtggcttaaccataggagcttctttcttactcctgcaaattctactctatcgctgttcttttccaaggcctctctcttcccgtgctgactaagaaatccagacccttcctttcttgggactccaacatcttgtcatgtgccttccatggtcaccactacaggggaagacagagcctgtagaagtcacatccattctgttacacttccatttgcttaataccattggccaaagctaatcacaaaatcctgccaaatcacaaggctaaaaaaaagttttggagaggggttacacagaccttcagtgagcagtagagcataaaggtacagttaccaaaatgtattctgagaaatgtgagggatatgaggtattctgtaggaaaatataaaagaataggaacattctactaaacaaaacactgttgttaatacgatgctttaaattcttccttggagattgttaatatccactgtcagttttgagaaatgatgctataaaaagcacagttatctttatttaattcagtttttttttgtttggtttgggtttttttttttttttacaaatttgattgaccatataataatttcttttcataacacccatgaacctaatgtcccgttgaatccacagcaggcattttgaaatactggcaataaaaacataatggacacttaataaatatttggtggatgaatgaagagtcacttttcagactcagggatgcttctgcatcaaattttggagaacaaaattccatacaacacctgcattacaagttgaaaagtgaaaatcctaggtcaaacactacctttttcttgcaacatgctacataagaatcttgtgggttttttgtttttctctgctgacttgagtggttttttgatgtcatcagctgcagctcatctgcccaaaatttcacagtggaatcatcaggatttatgctcagcatatgcaatccaccccacacctctttacacgtgggaatttcgggatggaacataaataccccatgttatggagagaataaaaataataccttggataagccatgctttaaatggtgtttcgtgctaaaaacctcacaaaccattgcagcgaggttcagcagcagacagcgctacttctacattccacataatccagttcagcgaggccttcagcaacgcacccgcatcgtaacaacagctaatggtttgccttaggtccgcagagtgtctggttgttggcagcaaaccacagaatccaggagcagaaaacaatatggaagcaatattattttctatctaattctctataatccagaaggttggttatgctgaatgataacacacagaggaaagattaaatataataacataatgttcatgttctgcaccagaagttattacttttggcaccacagagacagatggctggcactggccattgccaggaggtgttaagtgggtaagtggtgcagaggaatatagtcatctgtggggaaaatgacagtaatgaactgcttgtaatgctgtgaaaactcaatgaatttgattaaacacagattgcaaaactgtttcctggacgaccattggacacactcatttacgctgaaatgtgctctctcccagatacaagtctgacaggaaaaccactgctgcttctgctgccaatttgttaagcatcgtgacaagaggagtgaccgagaagatggaaaagcccggtctgcctagtgccccttcagttggcaggattgctggcacagggccgtctaactgtgctggaaggtgttttagaagggacaaggtcagcataagaagaagtcatcttgggcctggggaacacacttgtaaaagtttttgttagatctttatgtttccagcaaccacattatttgtattagattaagtagtatatagttagttagttagtatgtttgtttgtttatttatttatagagacagggtctcactttgttgctcaggttgaaactcttgagctcaagcagtcctcctacttcagcctcccaaattgctgggattacaggcatgagtcccaaggcagttgatttaatgtggatagaaatatgtcaacgtagtagtgacagagtatgcacatgtataaagtttgaagccttctagagagaacacagaatgggacaggataagaaagccttatagttaaggatggtgtacaccaagtgtggttacaggactcgtactagtatgtcgactcttcattactgttcataagcaaaatgcagaaatagaaagtaagcatttagaaatgttcatagcaatttgacaattctgtggaatgtaatactgaataaatggaggttgtgttgtttgtgccttttaaaatttttatttttctagcaattcatttttattatactttacaaaagtattgttctgtgatggattgagattttaacaaaaatgatcttccaccacaaacagtttgaaaagcaatgcattgggatcatagaggcagttttcatctgcttgttttacaagattcattactttaggcaaattattaacctatctacattttgaatttgtcaatatttaataactatcagatatatcactattattaaataactatatacaccatgaactactcacataatctgctgagaaattaccaaaatatttagatgacccgctcttactctttcaaaaagcatatgagctgaatggtcagttaagttcagtgtcttggaagaattagtggattacataacacacagacttgcttcattcctgtatttagttcatgcaacaaatatctattgagccttgttctagacaggatttcagctgctgagcgtgcacaagttaactagaattgaaaggatccttgcccatgtggagtttgcatatctaacaagggctacagtcaatacagaatggatataacacatcagtaaactgtacagtatatttcagattgaaaagtgctatgaaaaaataaaagcatagcagggaaagtaaagaggacatattttaaatggtcaggttgagcttcaagattttttttcaagaatcttgctctgtcgcctaggctggagtgtagtggcgcgatctcagctcactgcaagctccgcctcccgggttcacgccattctcctgtctcagcctccggagtagctgggactacaggcgcccgccaccacgcccggctaattttttttgtattttttattagagacagggtttcaccgtgttagccaggatggtctccatctcctgacctcgtgattcaccgcctcagcctcccaaagtgctgggattacaggcgtgagccaccgtgaccggccatgatgctgggtatatttataaggcagaatcaacagggtttttctttttcttcttttttttttttttttttgacagatggggaggaaggtgtgagattgagagagagaaagataaatcaaggaaactttcaaggttctaggcctgagcaacgggaacaatgcaatcatttaggatgcgccaagctgtgggtagagcagattatgcagaggtgtcggtagatcacgagttttgcttgggatgttttaagtctcatttgtctgtttagatatctaattgtctcaagatgtcaagcaagcagttggaatccagagtttgcaggtggtaataaatttgagacttgttagaaataaatagaatttaaagctgtgaaaccgaatgagattatgaagggaacaagtacagataaagaaaaggacgaaggactcagatctgaggctcttggacataaggaggttagggtgaagaggaggaactgggaaaggagaatcagacagagtgaccagtggaacagggcaggttatagagtgtggggattcagaagccaagtgaagaaagcgtttcaggaaggaaatactcatcagctgtgtcaaatacagctggtaggtcatgtaagatgaggactgaaaactgacctttggatttataaatatgaagttgttgagaccatgaacagatgtaatggtttgtgaaatgataaagacaaaagtcacatggaagtaggtttaaaagagaatggccagagatgaattggagacagggagtaaaaacaaatatcttaaggagtgtagagtacaagggggcgaatatatgggggcaatctttgatggcagcagtagggtcaaaagagatattttatataaatttgtaagagagtttattctaggaaaaatatcaagaaagtaacagtacaagtcaaacagaggtaagatagacacagaggtgacgctcacatgaacaaatttgagagactaatgcagttgttagaagtggacgtagtcacaacacagaacacttttaaagcaaaacagaaatcactgtatgaattgcttgtctgatttcaagggctacacttttctaattctgtaagtggtgcttactaggaaaattgcacaggcatttgtttgcaaatgcaaactcttttgtaatcatcattgaggaatttgtacaatcacacatttcttcaaatgataattaatactgatgcttaaataccaaattgataggctttcttgctctctcacttgcaagctattcacattctagctgtaattaagaatcaggagagagccctttaaggtaatgggtgccagacaattttctgtagtctctactgccttcagtttcatgtcaatgtattaggtaggagtaaaagcaacagttatctttttttgtatatatatgtataacatatacaaatggtatatatatttcaatatcataatacttatatattatcatctaagaggcataatacaaaagaaaaattttggtcacttatgtcacagtgtgttacaaaagttcctggtagatggatagtttcccttggtcattcaggggtccaggttccttctctcttgtggctgtgccttcctttagggttttggagaaagcagatcttcttcttgtccactgtggcctggaagttacatatttcacttctcatatttcattggtaacaactggtcacaaggcacctcttagatgcaagaaggcctggggaatgcagtccatattcagtcaattcagactcttccaacgtaattctatactatgaaagaaaatcctgccacttttttttttttttttttggagacagaatctcactctgtcactcaggctggagtgcagtggcgcaatctcagctcactgcaaccgctacctcccaggttcaagcgattctcctgcctcagcctcctgagtagctgggattacaggtgagtgccaccatacctggctaatttttgtatttttagtagagacggggtttcaccatgttggccaggctggtctcaaactcctgaccttaggtgatccacccgcctcagcctcccaaagtgctgggattacaggcgtgagccaccgcgcctggccagtcctgccactttgatggtcaaccagctatctgctataaggaatgagcttttcaagggcaaagacaatcaaatcactatctgattttctttgcctagatggtattgaaagagtttgcagttcttctatataaaggaaagcaaagggaagagatataaaaatgttcgaacataacttaatccatgataaattagaaccctgagagttgcaatgaaagttagaaatgtttgttttattttgtttttacagaatgtatcagcctagaaatctaaaaatgaagcatgaatcctgtcataacctacaccccccaactagcatcatttatatatgtagagcccatggcatttattgctttcttatttataagatcatattagtaactagtggcagtgataaagaccagtcaacattaacgccattcaaaataataataacaggaaaaataatgtctttgaagagcggctaaaatcaaacttggattggaggctaggaaaacaatcagtcctcatcatagttgtaatcatataaaacattaagtaagttgtcttcattttgacagtttaatcacatcatatactcttcatatagggatattcctttgaattaccttgtggctctctgtttatataaatatattattagtttatgtttatatatttagcttatatgaatatatacttttatatattatctacataagtacatgtatatttatatatcatatatagcaaataatatatagtatatttaaacatcattacatttgtggtcttcggttttgtgtgtgtgtgtgggacttttctttatttaaaggcctagcttctcaataaagatgcatacatgagtcatagtattagaagctcaagaataaatcttcactgaataacggactgaatccttgtacatcagaagtcccattgctctttctttgacttacacattttggggtctacaaaaatagccatagtgaaagttcaaagtaactaagaagttaaaaaggaaaataaatcttgattttttatgacctttggcaagagatatgtgaaacttagtaaccaggtaggtcatttttcactgccctttttcttccagaaaattgtcattcttaaaatgtacatttgaaaacaatcctagctattttaaataatgccgaaataaatagggaagttcatatatctctttaagatactaattttatctcctttcaatatatatccaaaagtaggattgctgaatcataaatggcagttctatttttaattttttcaagcggcctccatactgttgttcacaatggctataccaatagatacactttttaactgtcaactgcacctcaataaacctggggaaaaaataatctctatgtcagcatcagttcaatattgaaaagtcattttattcttaagaaacatcatgagagtacacatattggaaaaaaaaagaataagtctatttctttatcactgcattgagcagaatgcaaaaattatgcttggtaagggaggttaactgaaccatacaactttaaaaatatttcaacctcaaaatgtcattaattgcaaatgagttgcaaatgttccatttacaactcgaaggagtattggacaaatgttcagtaaatgtttgatcttaatgattgttttatatctcttcggttcggccctccagatctcctttccaactttctcaacacaattatcatcccaggagtggggcctggagtcaacaggctcctttgacctttgactccaggttgcctttggccaatgaaagccccagcaggagatttgaggggaggaggtgaaggggcaggcttgacttcagctggagctgccctgcaggactgcctcaggctgggtggaccctgcactaaaggtcacaggaactctcaaggctacacccatcccatccaggaactactcctttcccttgattcctaaaacctggaggtggtaacagctttgctgtgattagccaaggtaatgccagtcttccctgtggtttctttgtaccctgcccacacctttccaagcactctcatattgagagtgccagctatctcctcaagccaggactctgattcaaagataaaaatatataagaaatgatgcctattactataaaatttcatacagttcagtatagaaataaaacatatgtgcaaataaatataacacatgttttaaaaaagcactaggggccatttgaaaacaattaaaatgctatggagttttaaagacagagtaattacctcttttggggtaatcagaaaagatttcctggaagacacataaatgggacctggaaagatggagagtatttcaaatactctccataatacataaatgggacctggaaagatggagagtaaggaaaggagcatccaggtagaagaaatagggcaaacaagggaacattgggaaaaaaaatggcatggcttatttggggaactgtgattaaattgtattagaaaatgaaacacatgattagaaacaacagaaagaatagcaaacaataagtaagtgagggacgagttgagttcaaatattagagtagttagaaatttggtagacattttaaaatcagcgatgggtttataattgtatcttactgtgtgtaaaactatcaaatatataagcatttgagaacaaaggctgaactttagaaaacttaaaagcgagacccttttgtagaattgttagagcctgagcaagggtaataacaagagtaatgaagaggaggagatgattgagaagggtactgaaagagttacgactctgtgggactcagagccactcccagtcgtatggaggcatgacttagaagaatgtgtaaaggatgattccggatggcagaaaggaaggatggaagttccattaatggtcatttgaaagtcattagaaggaacaatttgtgagaagaagacaagttcagttttgataaaaacaaatgtagtatctgccagcctgacattaagatgaacttggggagcagatgatcacaaatgtagaggtcgtgcccaacagacaggatagagctagaaggcaggtttggaaaaaagactaaaagaggtgatcactgaatcacaggcaggagatgaaacttggattaatgctcatatgtaggaagagaaagaaataaaaagattaagagtcattaacatagagttaagtatgttaatgtgtagaaactatttagcacagtgcctcgttaagggtaaattcttaataaaacacaggctattattaaagtcaaaggggaatgttaggacaatgaagtgtagaatcaagaagatttaaataaggatacaagttgctgcagtttcaagtgctctaatttggagacgctagagatagatatttggaatatatctaggaagacagaaaaagatgggaaaaatagataaaaaacatcatctactctctggttttccctaaatactcttactttctgaggtcagtatttatctcttgtatcctttccaaggactgtggaaagcttcgtgactcctctgcaatatcatcgaaatgtgtgttgtttatattgactaagagcataagccatggagtcagaatgcctggatttgaatcctggcttcttttttaaactgaatctatgactttggacaaattgcttaagctttatgtttctagatgttttcatctataaaatagggtcctgagataacctacctatctctattatgtaaatgaggttgatactttaaaggtaactcctatagctaactaatcagtgttggctaatgcatttactatattttgcttccagttaattacatatttctgcatctgttaactaccctttctgcaactgttaaccccctttccagccactctgcatgcactgggtgttaacagttgttgtagcagaagtagtaggtaaactgaacaggataccaacacagaacaggcatcagcgcacaaataataggtatccttgacctcaggtttttgggccaccttggctataaggaatttctgagccctatccatatcactcaggacctcccccacaatgaaatcaccttcccaagtctatgttattctctatgttttgggctaagagacatgaagtacagagaggttatataaactaatttttaaaaataaattaatgaaatagaaagttggcaattagcataagaaccaaacttagttctaaaatataaaaacctacaatgttccacaaatttcaaaagtatgttgggacagtattaaaatatccaccaatactaaaaatgatttgccacagtttgaaagatgcataaacaactgacaagtctcttccccatgcccctactacgtaaacctgaaattgtattttttaagtgaaaaaattggatcataatataaaacaggcagcaagtggcttccctgatcttctggctaccattgtggtttatttgtatgtacgattttatataaatatggaatttgaatgcttttaagagttaaatagccacaaacttcaccatcctctattactttgcttacgtaatcagtctgattcacacttttttttttttttggttgctgttgtttctttgtttttttatacctgctaggacttgtgaccatttgaggttgtaacttagtagacgccaaagataagacactttcgttgatcgtctttattggatttcatatacgcacattattcaggggaactgactatctccaattcaggcctagacaactaatttattcaaagaacattaaatatttagtctgagttgttttatagacaatatgctgtcagtgatgttttgttcccctatatttctggtatcagaaatattgtcatttttatttacaggtgtggaacccaactgatatgcctccagggaaaaaagcataaaagccttttgtggtgtagcccactggggaatctggagtttcaacaacctcaattgctcatttacccctatttttgtcaaaggcatattttcataagcattcccacactaaatcttggaggaacagaatattaactagttttcttttttctaatcactggctcatttaacatgaaaaagtaaatgacaccctagcttatttcatttatttttttatattgcttttttactagaactctaaaagcaaaaaggccttaggtatcataatgtacaagtgtgagtgattagcaggatgcaaatactcagttaatcacccaggaacaccatttaggggtctgcatggccttctttatagaggcaataaagactgggggatatgcgagcattaatttttcacataaaatgttaatgagatgcacaactcattactattctttcattcccggattttaaaagatagtctttgccatagttctatttactctaagaaggatatcttaagtagtagaatcctaaagtcttcctagcagccgttttcatgttcatggtagatttttgtttaatagatggccaagaaaacaacataaaacaacttagctcagagatataataatttacaagtgtacagagcgctgcagtttacaaagcatttttgagtgtattatctcatttgggttccctggcagacacactctgagatggagatcaggatgcaggaaacttactgccatgtactcttggaaggaagagtaagaaaactggactgggcagaaggagaggagaggctgtaaggcaggcaccacgaaggcctcagccaacactgctgggaactctgaaggttctcatgagttggcgtgaggtggcttttatatttctctgtggaccagtcattgtatatggactaacccaagaaggagaaatgaccttgggcgaagcaaatcgttttagctgaggcaattccaacagcccttaaataaaatttaggtatttccctctcccctccccggcatatgtttacacaagcaaatggcaagagatgcccctggagaaatcattaccatgtggcatcatagggtccttccttctgggaacctggcttttccttcagtcaaaggaattttgatctgaatattgactttgttgcagaaatcgggaaaaggattgtgacattttatttgggcaacttccctcagcctcctgaccttctatgctagattttattttgattgcacactgtaggggtatggttgtcgactgcccatagggacaagttccattaatcctttctctatgaatcctctctctttcttttttctgtaacttctctgggtgaatctgtgaaatttgtctctctatgatgcaggactgttgatgtctttgctcatttttcaaagttttcagttttacgtttaattctaaattcctaggggtcaaccccctgtctgcatatgttggtgtctgtccataactgggcaggggttgtgctcaccaccttgagtcagtaaggcttccgttccttacaatgaatttaaggttcagaaggttttcaactcttccctagttttactttctactgggtccattcacatctcttatgcaaatgtgtgtaccctcaaggctaaacaggagtgtgtagctggcttgtgcccgcttgactctagtgcgcatgtgtgtagcctcagtctagcgtatgctgttctaaccatgcacccttaggctagttaatcaattggccctccctacttgaccaacttcaaaataaccagttctaccaacaaggctgcgctgagtgtggccaagtccactggtctaagtgaatgagtccctttgactaggacagagaagcttccagttctcaaggcccgtaacaccacggcaaagccttcattcctaccaagctggggtcagatggaagcaaggccacccagcatgccacagattccctctcttcttcttatccagagttcagcagattttcgtgagtgaacacttctcagattgttgtatggtgtttgtaattcccatagcactttaatggttgattgtgtttatgtatccatctctatagtggcactttggggagaggagtcacggatctcctggcttggccatgattcagcttttggagatttcatttagaatctgtgatctttcccatattcttcctaaaagggtaagttagagccagttttggtaccttaagaactaagagctttgtttgttttgtgaatccacatttcatcaatgcacttgctttactaatttcataatagtacaaaacattttatatgaaaaacttttgctttcttttattttaaatctctctttttttcttgcaaaggtcagttcttaactaaataagtcagaataaacctaaaggacactctacagtgagataaagtatctgcttccttttgttcacatgcattgctgacttggagctctatttctgcctgaacattcttgcaatgtgacaatgttgagcttggcaaaagaccctaagcttgagcatgggaagcagacaccaattctaggccaaatgtaatatttaagagcctatttgaaaagctaatttatgagaatgcttactgctggaagcaagaaaattgttagaaacttctcagtaattacctttactgaaaagggaatagaaatcattctgaaaatcaacgcagaaagatggcatatcaacttcctgaaccatcagaagcagggtttagaggttgatttgggctttgcgagggtgccagctgtgatgcaggcagctgcctgatagcagaagaatgtgggccacgtgcacatcacatcagagctccagtgacccatcagttgggttgggaacaggtgggaggcaggatggacttgcagtggattttaacgtcaatgaccttttagcaggtccatttaccaggacattcaaaaagcaaatgggaaggatccaaaatagttttgtgtgagtctcttgttttcttttatcaaatcaagtcaattctgtatatggccatgatgtaaaaagtgaatcagacccccatgtccttgaaagccaccagaagttcctttgctttgaatggaaggtcaacatgtttagaaaaatatatttattttagatagttacagtgaaaaagtgagtggttctgctctgaagctaaacaagattcctcctctgaataataatcaccaagaggtcagaacattttctggctgctttttaatgatctatttgacaggactcttcaaagaaacctctctcagcaactcagggttcgttggcctcctagtctctagaaaagtggttctatatggtccccatgctccaatacgcttccaatcttggaagtaaaactagcttttgttggcacactggtattctaaaacttgataaatagacctgaagatggggaaaatcataataaaaataaacaaatacctctttattatgatcttctttatcttttctcctagatatcaacttttttctatatattcataatatcagaagattgagttttagccccccagcacccccagatatacttataaataaataatattctctgtgaatattgtcaaaagaaagaactggaactgaaaagcacagttgattttgactccttttgggggtgtgtgtgtgtgtgtgtgtgtgtgtgtgtgtgtgtagaggaatggttaagttctagttagtagataagagaaatttattgtataatcacaatttcccttggaaatttatcttagaatatccagcacattgaatttttcctccagtattggaacaatttctatttctttcattgaacactagaagtagatgacttgtgtttgcaaatcaaaacaagcaaacaacttatctttaaacattagaatcaacatatctttaaatactagaacattagaaacatcaagtgaataccatgacaggaatcaaagattgagtccagagtagaaaaaagattcacgtctctcttctgctcacttcaaggcagcaagtggcaaaagggccagaaagatttcaattagccctttatctcattttaattattattttgaaatgagctgctaagcacacacagatgaagtgcattggtataaacatgtatatttgtacctatgtgatatagctatacaaagaacacacacatatgaacacaccacactttggaaaactagtgattcatgttattttccacattcttctgaagttattttttccccatgtgctaggctagaagtggggctgatggaaacgtctccggaattttcctctattaaacattcaactctgatgttctctgttaaaataaattcagtacctgtgagctaaggaaatgtgaccaagagtcccttagttaggctcagtaacccatcccttgagttatcttgattattgaaatgatttatttttcacaagacttgtaatttcacgcaaaaggaaggaagggggaaaatcacaaaacaaacatggattgttcaggaatactttcagattgcaaatgaaaagctgtaatagacaagtcatcaactattcagctttgttgggaatacaattgatcttgtcagggctaaaaacccatctgccgttgagaggaagataatttaaaaattccctaattagtgttccatttaatcttccactgtcatggtaaatgctttgattaaagtaagtaacactcatgagtcactacaaacctatttgaatgtccataaattgatataattttcccacccttcaccatctcaaccagtattgcccttcctggcccctgcaatatagcaaggatggattttcaacaaagcaaataaaggactgattttcacaagatctgaaccccgaggagcagattgtcaacctttcttctctgctgaggacaaagacaagatcacagaccattttcaaaacttccatgtttccagaggctccctgtaaagactacaatcctttctctaggggttcacacagtgttttctactcaagagtcacaggggagtttaaaaacatgcatattcccgagttcaactcttcgattttaattttgcagttggtggtagagttcaggtatttgaattttatcatcctttacagggattctgaagcaaaattactacttttccacttcatctgtgatctcctacttactttattactactaataattgttggtagagtttgacctagccacgcttagaacccagctgtctctgttaggaagctctttaaatgagcaaaggccctcaaatgttaccttttacttgctttcctacttagggttttagttccttattcttttattcatttattcaatgagtctttcttgaacacttaatgtgcaaagtgtagttttaagtattgatatggtttgcctgtatccccacccaaatctcatcttgaattatagttctcataatccccacatgtcatgggaggaacctggtgggaggtgactaaatcatggggctggttaccctcatgctgttctttgatagtgagtgagttctcatgagatctgatggttttataaggaacttttcccacttttgctcagcatttctccttcctgccatcatgtgaagatggatgtgtttgctttcccttcagccataattataagtttcctgaggcctccctagccctgcagaactgtaagtcaattaaacctctttccgttatacattacccagtctcaggcagttctttatagcagcgtgagaatggattactacaagtatcaaagatttagcagtaggaaaaaaaaccaaaaaattaatactgtaagggagcttgcattctagagaaaagaaaaggaaggaataattattcgagtatttgtaatcccaattgtaataagcaggggccaggaataaggtgtagggaggtaaggttgttatttaactgggttgactgggaagttccttctgacaagttgcaggtttgaacaagcctgccctgtagtaaactgggcatcctctctttcctcacacctcacaacccctgccaggaaggaagggcaaccctggagaaagcatggctgaggagacagagagaactgggttcaggtcacaccttgcttcagaccctgaatccacccatgcttctactttttagtaaagtaagggattagtaagatgtttagtaaggcaagctatttaatccacttctgtattttttaataaagtaaaacattaaattctttttgactaagtaaagggtatattgggtttgccctttgccaccagaaattctaatacatatgctaatttcatttatttattttaatagaatctattttgttattacataagaatattataaaaatcataaaaatacgaaagtgcaaagataaaaaagcaaatcttagaatatcattttaatgattttgccaagtattctatcatatggcttacttattgaaccaagctctattcttgtacatttaaatagtttatcattgttggtaatgagtaccaacaaaattgtaagaaatattttgagacaaattctttctcatctattattactttcttaggatctatttctcaaagtggaattataggctcaaagggcatatacacgtttgtggcttttgaaatacaagtgccaatttgcccttaattaggattataccatttttgaccacccatagaagtagccaaaagtgtttatttctttatacatttaccaacaccaaaaaatagaaaaaaagttttaatatttcttttataaaatcaggaacatcattgtttatttcatatttatttttattcctggaagatttaaactttttactatactaaaattttaatttgtttcttttgtaattgccagtttcttggttctaatcccattaaaatttttgaatgtctatattttttattaatttgtaataatgttttatatattaaatatattccttcactaataataataattcaagttataggcatttttatttattgagcccagcacaatggtaagccttttatataccacatataattttcctactctgatattatagactattattgtgcttttcttttagttctatactatgtaagatattcacttaacaaagatgagctcacatcttagatgaatctgctcaaaaaagatcacagagtaagtaaacaacagagctggaatttaaattcatgtctgcttcagtccaaacctatatatatatatatatatatatatatattttttttttttttttttttttttttttttttttgagacggagtctcgctctgtcgcccaggctggagtgcagtggcgcgatctcggctcactgcaagctccgcctcccaggttcacgccattctcctgcctcagcctcccgagtagaagcataatgacaagttgcttttgattattatttcctctttcctgacattcaggggtcaacaagctacagccaattttgtaaataaagttttattggaacatagccatactcattcattgatgcttttacactacaaggtcagacttgagtagtcatgacagaggtcatatggcttgaggagccctaaaatatttactgtcaggacctttatagaaaacgcttgctgatctttgcagttgcttccaccttctgcaaattgtataaatgcttggtctcctggatctatccttcatcttactatatcttattttcccctcaaaatttctagctagaattaaataaactattatatttttcttttagctataaactgtacaagaatatgattcattggctttcttgatattttaatccaaaaactaacattttttttgttcccaaaacaccctattctcactccctcttgtttcttatcatcctgtcttattttaatagcacagcatcttcttggatgtaactaagaataatatttaacttcttaaagacgttattttggatgagatccatttcacttatgaaggctgtttctgtcttgggctaggtgttgatgtttagaaatgcaggtctagatttatcatttatggaagccattgtggacttctctcaacaaattcttctctgggtcttcacagccatgccaattcagtgtgcttctgagctgaatagaactatattctttcacttgatcataatggaatttattctgacaaatagttgttagtgtttgtagcatgaggttgggcccttcctaactgtgaaggtagttagataaagctctgctctgtttttttttccttctttgtattcaataggaataaatgtgtaggactgtttttagcaaagaaagtaaaaaattatgcaagaactgattgtttttcataatctatagggttttagatgaaactcaactagaacttattagaaaggctcagttaccaactaagctaaaggaagcaggcttcaaaactggaatgtgatatatataagtcagtaataataaagtactcattagacactgtcctggtggggtcatattgcaaaaatccattgccaatcttgtatcgcattttaaaagggatgttaacaagcctgtctacatcaaaaataaagagtagtctagaaataatatcacattattaaatattatcttcaaattttgtagcagctttcatagagaagaatacatgttatgagtggctctgattaacagaaaaaaaatgacgatggaaagttatagggaggcataatttgactaaataaaggaagaaatatccttctaacagctagagatttccaaaaactgaatcggtcaccttctcaaaaatattagataattttagttaaaaacttaattttgagatttgaatcaccaactgtgtgacctaggtaaaattattaaatttatctgagtcattgtttctttattttatttggagacagagtctcatactatcacccaggctggagtgcagtggcgtgatctcggttcactgcaacctctggctactgggttcaagcgatactcacgccccagcctctcgagtagctgggactacagacgtaagccactgtgcctggtcttggttctttattttctaagtagtaacagtagtattcataatacaatgatgttatgaagataaaattatgttacaatggaatactcaagtatttattgagtgtgcactggtttaagaccattatattacaatgatcttaaatcactgcatactcaataaatactcatcctcaataaatgcagttatgctgctcataatgcaaagtgatgagctccccgcttcccaggggtaattcaggtagagtctagatgttctcctgcctgaaatagtgtgtaaggaattccagtgtgagaaacataagtcagagcattcttccaggattggagcacttgctctggttttgctctgttcatggaatgttttgacttatttgcactatagaagagctagtatagagattctaaaatagaaataagcttggagagttccaagaatagaaagaagaccaatgtgataaagcagaggaagaacgggtctgatgcccacccgtatccatttctccttttcttctgggcacgtgcagagattacatccctgtgctgctttgtagttagagacatatgccttttctgtccatgcaaataacaataaaatgtgttcttcctcaatggagcagtaaagagcctttcatggttcttgagtctctctcttttcctgtaggagtgaatgggataggtttcctgttgagatgactcacacctcaggtggaaaacagcaatctgggagtctcccatccaagaatgaaactataggaacaagaaacaaacttctctgttaaactgctgagatgatggagttatttttttaaagcagaacagcctaaagtaccctgactaaagcagggaatgactagtaatggaggataaggttagaaatgcagtcaagacccagtaatactgcatttcataggccaggataaagagagaacttgtgaccgatgtaacaaacagcccctggacagcagatgagtcacatgacctctcaggtgttgactcatgatgctaccataactcttaaacttccaaaccccaatatctcaaaatttgcatgacctgctgagatactagctctttaccctccatcagtaatgcaatgctgttcttcctaatttatgacatgagaaagtcaacttttttatgcatttgacagcaaacaagaaaagaaaacacagacagataagtcctctaagaatgtctttctatatagtcacctttaaaatcctttttttctctgctacacccattctttatctttgttttgttttctggcttttgcaaagaattgtgcaaaaggtagttgccaaataagggtaattaatttataaatatttgtgataatttttttctatctttgcattcccttttaatgaagaaaagattgccaagttttaagtttaactaaatacacacctgtctaggtcctagatctgagttataattaacattttaaaaggaaataagccaagcaacatatttgttttttttttttttttttttttggccaggaatcaaattagattttatgttgtgtatagaagtcagtgaatgcatgactacatgctcaacattagtttttaaatgacattgctatgatgatatcattgcctaacctttactaaggatttagtatgatgtatactaggtagacttataagcaacttatctatactatcctgtttaatcctcacaacaacattatgaagtagatgttattgttatgccattttttaaaggaggaaactcaagagaagtttaatgtcacacagataatgagtgtggtggatgtgagacagaatcaaggcaatttaaccaaggatgccacactgttaattattatgaaaactgtgtgataacataagaaagctaatgagaaaagtatatactttaaataaagaagttaatgttacttgctgattgaccactctgtgatttggaaaataatgtggtgacattttccgtgtccgaagatggaaagttaactgtggcactggagaccgacgtattatatagaataattatttaaacccttgagtctcaactttgtctgtaaaataaagattatattacctaccatacagattcatgatgaaaattaaatgaaatgatataatgtgtagtgtaaaggagaaatagaagacattcaataaatatcaattatctgattgagtatactctttacccatccctcagtgagatcttggggattagtggtatctatctgtaaattgttttataatccagggttgaaagctgttgtgtatacagaatgtgataattccttctggaattgaaaaaaaaaaagattttaaaatgccctttaaatttattctggagaaaaatgtcgtatacactaatggtaaataatagcaatcactgggaagaatagaaataaaatgaaataaattaaagtaacaaaatgatgctaatatttggagcagtgtagtataataaatgattaaaaacctgagttttggcgtcaaagaacctatgtttgaacctagactcttttgcttcttacctctatcactctgcatacctttctttaccctttttagactcagtctcctcagccatgtaaggtgaaactaaggcaaggttgttataagaattaaatgaaatgatgcacataaagtatttaacacagtgctggactcttacttgggcagatactgataattataatgattgcctggttccccaacatgcctggtgagatcaatcattaaccatcactaaataaataaatccctcctctactaatcttggagtatattgcacatagtggtccctttgagagacagctcagttggaaatgggcaaccatcgacttctatggcctatgtcactcaattttcaatccttcttgcacttctgttacaactgctctaaaagataactgtctctctttttatggtgtccccagccctacacacctacacccagtgacttttgcacatgctgtatcctcttctttggtattaatctttaatgcaaatttatccagcctttttgagtatgaataggaacatgatgggtaaatacataataaatagatagatacatatatacatggatacatatatacagttacagagtagatatgaacatatatctatgtagatatagctatgtgcatatagtacagatatattagagttatagatatagtatatgcagatacaaatatagatatatagacacagacatatagacatatagttatagacaaaaagagatattgaagggtaggaggttgtgtgaacgcactcacagctttttcttggcctgggaaaaatactttttagtatttttcttgtaccagggtagggatctcaatagcattcattatgctgattttgaagaataatttcccaaatcaaagaatgtagtgatgataagctcctagtgagatttttctaaacttttagctttaaaaaaaatctaccaaataagaataatgttgtttgcaaaacctcaaagtactggaatctgatagaaaatatagggacatggttgaaagaatgaacagcaatccaaaatcaaaagctattgtctctgatcatgatctttatgtctctacagaggtatatatttatgatttttatacttgaactttcaactctttgctaagtgcgtaatcatttaaaaaatctaaagtgactgatatcttattctaatccaaattgctgatattaggatggtgtattatgtgtcctttaaacaaaagaatctacaaaggaatgaaaactatagaaacccatgatgaagaattgagcttcaaatcattatcatggaataagaacttgaaatgttaattccaatattagccatcagtctttggaaaaagtcacaaaatgtataacaataattggtctgcattcttgtctagtaattaaacttctttatcgtgcggacttagtggtttgagtgtagaaggacatagtagttttaataaaatattaattattgaattatgttcagaaacatgtagaaaagcatgtgtttcaaaaacaatattagagctacttttatctagtcttttatatgttgaaagggtttgaagaataacctctctaggagcaacaattatttggtaacgaagtacagaaacgcactctggctagttgaagctgaagggaattttttggactataaggaaagaaggaagctgtccctagaaacccagaatgatagaatcacaggcatgttttcatctggaaagtaaactgcatgggcaaccacatttgggaagaccttctactgcttccagattttctggtcattatgcattccagggaggagcatcaaatccctgtagcttgagtcacgtgcccatcttgatcttaccagaaaataaaaagaaggacagggtgcaaggactcttcagaactccctttgtgtaccctaactcttgcatgtaataggccactctccaactaatgactagcatgtttccccttagataaaaccagactgctgttagggaaggaaatagattctaggctgccttaaaataaatgttttttttttttttttttgtcctccccttagatcctttctgcatagccttttgaataaggcagtatgttattactatctactgcacatggaaatggaagttgtttgagtttaagcagactatccaagttcatggtgccattaaggaaaacagacaagactagagaccatattcttgtgtcttttctagtagttttcctactacacccttctgaacagacattaatttattatttggtttctttcaactacaaatcaccttatttttcccttttcctctaaatcattttagtggataacaagctacagagaaagtctgtgtatcactgtcaaatcaccttttggacaatatcaccctgccatgtttctgtcaaaatgaatctgcaacattgacgggagaaaaaatatataaaggaaatgtcctcattgttcattcagggacggactcagctggagggaaccttgggaggtggcatcaccagtgcagactggatacaattaggagatgctggatgcctctctgtgttcctgggcacatttacactcccttaaaagagcaatttcactttgtctccatcccaagctttcattctacccctgcagttcacagccgtggcaaacactgaacacaattttatatttgtatgtgtggacagtgtctgtgacatattgaccttgcctaagatatggaagcctgcggctctttcttctaagtgtaggggaagaagccacgcgggtatgtactgacatggaatgaaagaacttcagaagctgtttacagggtttcctgaaattcaggagaatgaagcttgagacgtttaaaattctctttatagctgatttgaatttgctcagtagaacacagatcccagaaaagcctatctcatgacacctattcacactgctcttttgtgggtagaaaggaatatctccttttcccctaactctggaattaaatttctggggcttatgagttcctaggagtgtgggagaagggtgtggactacagtgtgtgctaattgttattatgatcattcatccatctgacaaatgatgcctaagtgatatctgacaggaaggctagtacttactttcagaagtatacgcccatgagtttttaatctcagatatacttagactcagaaaattcagatatttctgtgtccctatttgacaaacttccaccagcatcccaacaacaaggtaaaggaagggggctataaaggatgttttctgaaaatactttgagtcaccccatttgctatccagccataaacagaaccctcaaggcagggctccccaacccccaggccatggactggtaccagtttgtggcctgttaggaactgagccacacagcaggaggtgaggggtgggcaagcaagcaaagcttcatctgtattgacagccgctccccattgctcacattaccgcctgagctccgcctcctgtcagatcagccgcagtattagattctcataggaacacaaaccctattgtgaactgcgcacgatcttggttgtgtcttctttatgagaatctaatacctgatgatctgtcgctgtctcccatcacccccagatgagaccgtctagttgcaggaaaacaagctcagggctcccactgattttaccctgtggtgaactgtataattattccattatatactattttgtaatatataacatttctattattattacattgtaatatattattattatgttgtaataatgtattacttgtaatacattatgttgtaatactttacattacttgtaatacattacatttttacgttgtaataatgcattacattgtaatatattattattatgttgtaataaggtattacattgtaataatgtattacattgtaatatattattattatgttttaataaggtattacattgtaataatgtattaccttgtaatatattattacattgtaataatgtatttgtaataatgtacattgtaatatataattatataattacatgggaatacattattattacatttgtaatatattacattgttatatattacatatatgattacatgtaatatatattacgtataatataataaaatatataataatataataacatacatataatgtatattactatattgttacatgtaatatattgttacaatgtaaataatatattacaatttaataataatggaaataaagtgcataacaaatgtaatgcatttgaatcatcccaaaaccatccccctaaccccctggtctatggaaaaactgtcttccatgaaaccagtccttggtgccaaaaatgttggggaccagtgcctgaagggacaagtcctgacttggataaagacaggaaattgccacaaacatagagagcagtggagtgaagatttctgatctagaaaaacaatgacaacaataattcagtattcacagcctgagtagatttgggttgatttgcagagcagttggcctaagatccttttgagaccaccagcctaaatactagctctttccccagactcaccttaccactcactggccccacatgggtgaggccttgaaagtcatttaacaaagtacttggaactgaaggaacgaaaaactagagccgtgtgtcattttaacaatctgttatttagtctctgtgacacttttattttatcgttggtggttgatttttattttaagatatataaactaagattcattcattttttaaggtatgtaaagaaagattcattttttatggttttgacaaatgcacagaatcacgtatccaccaccagagcaacgatatagaaaattctcatcacttcaaaaattcccgtgtttctgttttgtagtgaattcttcactccaccatcaaaccttggcaaacactattctgtttgttgttgttgttgttgttttctgagacggagtcttgctgcgtcgcccaggcgacagagagcagtggcttgatcttggctcagtgcaagctctgcctcccaggttcacgccattctcatgccccagcctcccgagtagctgggactacaggtgcccaccacaccacgcccggctaattttttgtatttttagtagagacggggtttcaccttgttagccaggatggtctcgatctcctgacctcgtgatccgcccttctcgccctcccaaactgctgggatcagtttatcttttaaaagaatatcgtgtaaacagaatcatacgtatgtaactgtttaagtctggcttctttcacctgcacacaatgcatttgatattcatccatgttgttgcatgtatcagtagtttgcttctttttattactgggaagtattctgttgcatagaggtaccatgttttctacccattatgcagttgagagatagttttcagattttagagattaagaataaaactaacataaacatttctggataggtttttgtgtgaacataggtttttatttcactttgataaatacctaggatggaaattgctagatcaaaagacaagtatatatttaacattataaaaaaactttttttcaaagccaatagccaaaatgtttttcaaagtggatgtggctataccattttatatttccacttgtgaagaatgagtgttccaatgaatctgcaccttattcacatctgagtgtcattcacatctcagaagtgtcaggttggtgggttatttttttctttttttccattgtgttaggtgtgaagtagtacattgtggacttcatttgcatttttttttgtcactagtgatgctaagtagctttccatctgcttatttgtcatccttatattttcttagtgaaatgtctgttcaagtattttgcccatttcctaactgaattatttgctttctgattattgggtttgagagttctttataccttttgcataaaagtctttcatcagattgagttttgtgaatattttctcctaatctgtgccttgccttctcattcttgtttcttttgaagaaaaatccagttaattttggtgaagttcaatttacctatttttaaattagtctatgaatcatgtctttggtgtcatacctaataaatctttgccaaactcaaggtcacagagattttctttctttttttttttttttaaggaatgctgtgcttttaggtttcatattcaagtttatgatctattctgagttacttttgtatagggtgcaaaatattggtaaaaactcattttttcccatatttcagcataattttttgaaaaaactatcttgtccctaattgcttttgcatctttaagagtcaatcaactataatttgtgagtctatttctgacttttctaatctcttctattgatctatatgtttatcctttctctactatcatactctacactcttattatttaacgatgttctgcatttatagtatccttaattggaaaatcaaaggtattttttccctaaaaatttatcatttttactgcatgcatttttaaagggtaatttactctctttgttcacttttttgttaatttttactttcaaaattcataagccaaccagtttgaaaaagccacatactgtataatttcatttatgtgatattctgcaaaaggcaaaacagtttagtaaacagatcagtaaaagataaatagagcagaagtttttgggagtcaaaggagaaatgataaaacaggtgaagcatagttaatttttttacagggaggtgaaactattctatatgatgctataatgctgaatacattatactatgtgtttgtcaaaaatccatagaattttatagtactaagagtcagcactaatttatgcaaactgaaaataaagtatttaagggaccagggactctcaggatggaatataaactgtgacgaataaatataactgtatggcaaatatgtaaaacaaatttcctgaagtgggagaaaaaggtgccgatctaagtaaatctggaaaggagtagaatctataagattaaaggcagaaagaacttcacataagcactctagttggtaaagatgtttcccgcagaggtgagagttaacaattctgaaacctccatacgtgtctggaattgaatgattaagtaaatgaatggcagatgggtttctcatcgttggagggggcagttacagaaaaacaagtgaaaagactagaaagatccatgtggtaatagagttggagtcattagtgtgaactcatgtttagctaaatgtggatattgatggttacatacagaaatattgataggtatgtgtatatgcacagattagtatatacacatgtatctactgatagggcctaaacaacaaaacccttgcagcaatgagcgcatctagtgcccagaatttggtctctaattccattctctaataaaaggacccggggcttaatgaaaaaaatggttgattctaggactggaacagaaaatgagcctggagagcctcgtggtgctataaagaaaaatagataaacaaacaataaaaaaccctcactgatgggataagtcaaagagacgtaggagtcacctgaacaagctctcaatggccaaaactaaaaaatttaagcatcaaaataaagtcgtcctgaacgagctctcaatggccaaaactaaaaaaattaagcatcaaaataaagttgtactggatcccaacctaaagtataaaaccaatatgcatgatatatactggcacaaataaatgatcaaaaaaatgcataggggagaataagcaaatcttctatgcagaagaattctaaataatttgtttgtccttaagaaggtaaaacttaattccccatgctttaagtgtgggctgaacatagtgactttcttccaaagagttcactatggaaaggaggaaaaaaaaaaatgactctacagtgaagaaatctgacaaacactgcctcagcctggcaatcaaagttaacaatagcagtaatcagtcatgttgatattatgaatccttggccaggcatggtggctcacgcctgtaatcccagcactttgggaggccgaggcgggcagatcacctgaggtcaggagttcaagaccagctttgggcaacatggtgaaaccctgcctctactaaaaatacaaaaattagctggtcttggtggtgcttgcctgtaattgcagctacttagaaggctgagacaggcgaatcgcttgaacccaggaggcagaagttgcagtgagccgagatcgtaccactgcactccagcctgtacaacagagcaagactccatctcaaaataaatacacacacacacacacacacacacacacataaatccttgaccaaaataaatacacacacacacacacacacacacacacacacacacacacaaatccttgacataatgtgatgagaagggtgcttcacctctggagtcttcttccaatacactatagccccaatctaatcatgagtaaagcatcacatgaatccccattgaggggatattcttaaaaagtacttgactagtaaacctcaaacatttcagagttatcaaaagcaaggaaagtttgagaagctttcacagccaagaagagcctgaagagacatgataaacaaataaaatggtgaatcctggatgcagccctggaaaaacaacaaagcgacctcaggtaaaaactaaggaaatgaatataaggtatgggttttagttaataatgctaatcaatattgattaattaattgtgacaaatgtactatacaatatgaactgtaagaactgggtgtggggtatatgggaactccccgtatgaactttaaatttttataaatctaattctaatctaaaacagaaaatttattttaaaagcaaaaaatgaatcagaagcttttctacttcagttgtaaaaatgagactccaaagaggtttcatctcactttccttcattaatctaaaatttctaaaactgtttgcttggaaggattatgaggctaggttctatctcaagggcaataatgccacatcttccatgggctcaagcaaaagggcagtggcatgctgctgtggcagacctcggtgcacaggggaaaaatgaccacacattgttttgtttgttttggtatttaattgattgaccaacagaatgtggcagacgtgataatctgggtcttttgaagacaagacctaacaaggctgcaacctctagaatcccttagaacagacagtctaagcacattgtctgtggggactgaaattccttgtagtaagaagccccagacccacagagaaaccaggtgtaagtgctcagttgacagcctcagcttagctccccaccaatagccggcaagtctggacaggacacatttgtgagccattgggtacctccatcccaactgagcagtgaatcttagagatggctcctgttctgatcaccatctaatggcaaatgtatgggagaatctgggtggcaactccccaagctgagcccagtccatctacaaaattatgaagattaataataaatggttgttacgaggcactgagattcaagatggtttattatgtagcagtagatattcagaacactctactaagtgctgcggctccaaactaaattttctaagagcactccatgtacaaacaaacaactacaaaaaaaagcaaacgtttgccatgtgcctcttatttgcaagacatggttcagcacctgtaacttgaagccttagtgctatcacccacagaaagaaagcatctctcaagtaaccattgtgaaatatttcaaaagagccactggtagtaaaatttatgtcttctttttaaaggttatgtcttcttttataagactacccactgcctcttctcaagtatatctgaagtatggctggttggagtatatcaggaccctcagaggagaaaagcatataaaaccagcacacctgaacccaggtaaatggaaagaccctcattattatctttaccaaatattgacactttgcattaatttagatttaacagactactaagggctttgtctccccacctaaatctcatcttgaatttaatccccataatcctcataatctccacatgtcaagggagagaccaggtggagataattgaatcatgggggtggtatcccctatgcagttctcataacaatgagtgagttctcacgagatctcatggttttataaggggctcttccccttttactcgacgcttttccttgctggaccctgtgaagaaggtgctttgcttcctctttgccttcctccatgattgtaggtttcctgaggcttcccaagcatgctgaactgtgagtcaattaaatctttttccttcataaattgcccattcttgggcagtttctttatagcagtatgaaaatgaactaatacaactaatagtaagcttctaatgcaagatgacatttctaaaaattattttacagaaaagattcgttatgaatccgccaagacaccatactgttttaaatctgaagtaaaagttagtctcaacaagttattgtatcttgtctgcatgagtttgtcattaaatgattctgaaatgcaatgaaaatggaaacatattgcttaatgagaatgattttatcaatacctgccttttcttttaaattgctttcactgtttaataaaagaggaataaaattatatgaaatgtatgccagtaactcaaaggaaggggtgagatgctctgtgcatataactttgggaaggagtgatataccagcaaggagtcaaatgtcttaactctgtcccaggttaactcagagccaggcatcaagggaagcatgcaggtgagtgattagaaattctcgtcacctggagtggatgcctagctctgctgctcaccagatttgtgacctaagggttgtaagctgtcagagattcatttgtgaaataaggtataatagcactggccttagagacctgttgggggttaaaatgtgattaagcttttaaagtggttgacataatctatctgtctaccatgtactaagcagtggtaaacactggcctctaattgttaaaatgaccttgaatctctgcatcagattctgtgcctggacttctcctattcctttctcttcaggaaagacaccattgttcacaaacaatttcagttcattgagaatcagaataattcctctgacccgtctgcttttgaaaatcataatcttggagaagtgacgagcataaacatctgtagggattagtgatcatggtcaagttatttaacccatatgtgcctcatattttcatccataaaatagggataatatagtacctatcagacgaggcaaataggatcgaataacatgatacatgtgtagaacctaacgcagtgtctgacacataggaagcattcactttgccattattatgttttaatcatttttattaatgtaaaatattttcattaggcatatcattagtaacctcatgtcctgatatctttgctactagtctttttcctagccattcattctttcataaggtgtacatgagggtaacacaatgaaaacactattaatagggtaatagaggacactgaatgtctcttagagggaatattgctttagtttttagaacctctctctatcacccaagctggagtgcagtagcgcgatctcctctcactgcaatctctgcctcccaggttcaagggattctcctacctcagcctctagagtggctgggactacaggcacaccaccaaacctggccaatttttgtatttttagtagagacggggtttatgttggccaggctggtctcgaactcctgacctccatccgtattgtggatactcccaaagtggtaggattacaggcatgagccaccacgcccagcctatattgctttattagtaaagttatttttaaaaccatgtggagtgtcgggtgaaatattgggaatgtgtctaatggttctcaagcaacaaggtgagatattaaatgctttgctcaagaggttatggagaatttcccccaaaagtgaagaggagagagtcagaaggtccaggaagggagggaaatagaaaaaaattgattgtgagagactgcaggatgggagccagtatggggtggttgaggattttctaagaataggcataatcacttttaagttttctgcttcattgaaagttccttctctacccatcaagtagttccaacccatcataagaaagtctgttttactcatgaatgtgttaaacctgtgggagcttttatgtatggtcattaagaaagttaatatcctggatgtggggacgggttgtgagcaaaaaatgacacacatctagaaattggaattccggaagcaggggtcactctgcctcattccttacccagtgcagaatgtatagaaaacgttgagagtcttcaacatgtccacaaagcatggaatggaagactcaagccagtgtgaactcaccatcatgtgtttgtgcccagtctaggaactggcacattttttaaaaaatgaatatatgaatgaatgagatcacagctgacatccgggttacatttcatctcaggcattatatatgtaagcagtatttacttgcaagctgttcaggcatcattctcaaagttctctgactgaactctttagctcattgagaatgtgagtgtactaaactagactggttgtacatttattatgcccaaattttattcatttaatgtacttttcctaaattctacgatgcactgttccaggtacacaatgtctttgcctttttggatctttcatggtaggtggataaaacagaccataagcttttaacaaacaaaagtatttcatatagcgctatgaagaatgtcaaccaaggtgtttggtcagggaggatctcagcagggaattggataagaagacctgttagtgaagatggtcagataattcttctctgaaaagacttttgggttgaggtataaattatgacataggacacgggataatttggcagtacaactttctatgtgaagggctgtgatgagtgaggctgatggaataagaacaagataagtgtgcaggcttcaatgggagatggttgaatgagatttggagaggggtcagtaaaaatttggattttattcggagagcaacgggaagcctttggaaggtttaaacacgagagtggtatgattcattataagagtatttgttttacaataaacaatgctcatctcctctgttatctcatttaaccatcaccacaaacatgaactctaagctttagtatcaggaatgcaactggagctcagagaggatatttgctctatccaaggtcatttgggtaaaagggaaaattgaggattttgcaggatggccagcaagcattggctgcctctcaactggagctctctttgtttaataattgatggaagggaaaagaaacctttctaaaattgctgctaaaagacacaatgtagcagagtgatttttttttcaatactctctgcaaagtaagctaaaactcatctttccaatgagcatgagtataatgcctttcctgatttttttccaagtctgtcttttacccacggtctttgctgagcatgcatgtgcaactccctaccagcttctaaggctttagctgatgacctgcaatctggaaaaggatcgagagatcagagtggagggaatgctgaggggatgtaggaggtaccagaaaggggtgatccacacagcaggcttcagacagcctgactcaacaacaacagagctgtgtataaaggtctttgcaatgtttagctttatgtgaaatcaagttatatactgtgatgaaacatctaccagtttctagagtcaatatatttaaaattagtttcaatatgactgatacacattgtttggtttatgtagacttcacttcagtggtattatagtgtatgtattttaaatatttcattacattttatgctgtttcatgatatttttcatgtaatgctctgaattttatatgaactctgaaagaaaactttacctcatttacatagtatagttgatctttcttgtaattcaggatttgagaacttactccaaaattatattaaaagtaaacacaataaaaacacactttaaagactggtagcattaacacactaaagatattttgattttaaaaatcaattaactaaatacaatagagtatacctaaatatcagaaaaatattgtttcctcttgtccttacctacttctcctcctgggcaatattattcacttcattgtcaatgaaccagtatctgtcaaatttcttctagacaccaagcaggatgctaggtggtgtgtagacattggtgggtaaaacagacatagatcctatggggacaaagggcaatatatagacaataaagaaaaaaacttacaagtaaataaatgaatataccattacaaattgtgtcaagtgatggcatgtagcagaagaaaatgacaataccaaaatgaagggatggcatatactgtcgtctcccttatatccgatttcttccttttccttagcaatagcactaattattgttgtttgggggcagtgggatgctagtggtgatggtgaaattatatccgacttaaaagaactacatttcccagaatccctttcaactaggcatggtctgtaatacagatctgaccgatcaggtagaaggagatggaaacattgcttcctaagaggactacatcctcagtggttcctttcttttatcaattaggaacatggacaggactctggagtgtggtcatcctgtgaccatgaggcaaggagcatgaagcagagtgtaaaggaatctgaactaaccctgggcttcttgttatgtgggggggggggggggattatacagcaaatttacttaaaaatgtgtattagtcagatttttagttactcatgggtaaatgcaatccctaattaagggtgtgaagtgagtgctgaaacttgcttaggaaaagaggtggaaaaattggatgggaattaagcatagaggtaccacgaagtatctgaaattgtttggttatgtctgtagacaaatcaaatgcttaaacaaaataaactgaaattttcaacacatgcacacacagagtcctcatacttttagatttttagtttaaaaaataagtatttggcacacatccgtattcacacaactcttttaggcatctacttccctttacctgtgcaggcctatacgtttaatgagcagaataaaaaatatccattccttaggctaaggtttcatttttacattggactaaaatagttcccagctttggtttgcaatattagaaatctggggaggtttgaaataatactcagctccaggcctcaagcaagaccaaatgaaccttagagattctaattcagtaggtctgggtaccttgggaggggtctgggcattagtatttttttaaaagccccttaggtgattctataaggtcaggtttcagaaccactgatctaaaggaataaacttgagtctggctgtccacatacctaaatcaccccaaagtgcagtaaagtgcaataatacagtggctcagaacgtcctttatttcttcagcaagaaaatctccattccagtgttaaattcgccagtaaatgattgggtgattttgagcaaattattgaatcttctaagcctctttcctcattgaagactaaatgaaatagatgctgcgcacctaccaagataacactgtattatttgtgggaagttgtgctagctgagtttttcaatcactatttgcaaattagcaggggctccaaatattaaaaccatgcaatatggttaagatctatgtaagtacaatgaaatttctacatccaacacaatcacacaaacatgactggattttcagtgtttggaagatactttgaggatgaattcacttaaaatgtagacaacatgtcaggcaaaaatggactttttgagttctgtggagacactcagtagaatccaaggcatgtaaaactgaacagtcagaagcctttgtaaatgcatttgaaagagacaagtcatgtttattaagatgctatgaaaaaatgaaaacaaaacttaatgacttcatatatgagcttccaattttttaaaaaaagcctctagggtaggcccacctagttgcaggctctgatttgcaagaatgctgctctttacaggacacatttgtgtagctgctccccggtgggtcacagcaggaatgttatttacttaaccatggggaatggtttttcagagcaacccccaaggaagccagaaagtaaaaatgtcttcattatataatggtatcatagtcttagagttagaacaaatgcttaataccatctactctgagctgtttattttccagatttaaaatctatggcctgtatgttaggtgcctctgttaacacattctaggaggttgatggagggcaactgcaagcccttaagttgaagttaattctagtcccctctgtgtttctctttgagccgtgctgtccagtgtggcagccacaggccacacagggcttttgagttcttgaaatgtggctagtttgagttgagatgtactgtaagtataatgtacacatcaaatttcaaagacttagcatctggctgggtgctatggctcatgcctgtaatcccagcactttgggaggctgaggccggcagattacttgcggccaaaagtttgagatcagcctggccaacatggcaaaaccctgtctccactaaaaatacaaaatttagccaggcctgggggcatgcgcctgtaatcccagctactcgggaggctgaggcaggagaatcacctgaacccgggagttggaggttgcagtgagctgagatcatgccactgcattccagcctaggtgacagtgagactcgacctaaaataaaaaaaagacttagcatcaaagaaaaaaaaagaacaatatcattaattcttttttctgattacatattggaatgacaatatttgggatgtattaggttaaataaaatatattaaaattagtttctacattttactattttaaaaaacgcaactaccagaaaatttaagtaacatctatggctcacatctaatttcttttttattttttattttatttttctgagacagagttttgttcttgttcctcaggctggagtgcaatggcgcaatctttgctcattgcaacctccatctcccgggttcaagcaattcttttgcctcagcctcccgagtagttgcgattacaggcatgtgccaccacgcgtggctaattttgtatttttaatagagacagggtttcaccatgttggtcaggctggcctcaaactcctgaccttgggtgatctgccagcctctgcctcccaaagtgctgggattacaggcatgagccactgcgcccggctttcacatctaatttctattggacagttttaacttagatttcctatgacaaagtaagtaaggtaaccagaaacacaaaaagattgacagtcatgtaaaagttaaaaagatgtggtcagaaataaagggagagagggatcatggaataaacgggtgtgaattggtgtagtcaggtatgaaatcctaaatatgttctcaataaggggctactagctcatcttttagaaacatggaaaattcactgaaggaaagggaatggaagcatctcattcagtgttttcaggggcaagacctcaacatttagaggctaccagctgttctcctttcgaggtgtctttcttattctatagggaaaaaaaactattacatatatgttataagccctgaattgcatgctgacaaataggtttctctatagcttaaggatataggcaaaattttagtaaaggtaagttatttttacctgagacatgcctaataatggtatatattttcatatattttctcttttttaaatcatacagcaaaataactttttgtatgtcttctaatacacacacttataggtaatagcagcagacttagtaaatgtgatactgtagattgggccactcactgctcaatacagagtttcttgtgtatagttatagctaatagttttcatttttgatggagatttgtcagatttgtgtgtggaggtgggttgggggcggttagagacaaggtcttactctgttgcccagattggagtagaggggtgtgatcatagctcactgcagcctcaaactcctgggcttaagcaatcttcctgtctcagcctcccaagtagctaggactacaggcatgagccaccacacctggctgattattttttcttttgttgttgttattttttttggtagggataggatctcactctgttgccccgtctagccttcactcttggcctcaaacaatcctcttgattcagcctccaaaatatttctatcaggtttaagatggaaatggaaatgcctaccattactcattttgcattgcaataaataagcttcattaccagtggaagcttattaatttctttgtggaaatgcattccttgctgattaatttcccctttccttcatttttaaactgcaaaagatttgtttcaaaacccaaagattaggtatatttcattctttattgagcaagtaacaaaagaaaatacattcacattattcaggaagcaatcatgaagatactttatagctcatttgtatcaatatcaaactaatttaatgacaagtcaaacatcatgccctttaatcatggaaaactgtaaggtatttcagctgaataaattaagagcaattaacaaaaaaatgagctacacacatgaagctcattattttaggttgagggatcctttcaatttaccgggattattttctttgatgtgccagatgcctgttttgcccaacaaaaatcaaaacactccaaagcataaaagtatgtaccccatgtgttgtttaagatggacttgataactaacattggacattaacatttgcagctattattccttggtgaataaatattccttgtccaaaggaaagatagaaatattcaaaataataaaataaaacaaatcggattcaactgtacaattcatgctggaaaattagctaagattaggaagaaagaggttgaacattggtcacaagttgtctgataaaaggcacagataaatgacatgctgctagtcttttgtattagacaaagagaaacatgtttcatacatctgcttgctttgagcagaaatcttttctaagcgtgtataaattttctaaaatttttcataaaatatgtaaatatttagtaacactgcctcagtgttccaatggttataccaatgatatttttcaatgttggtttttaatgcgcctattaaaggaaattcaggtaattactatctttttcttttgccaatgaatgagatcaatagcatggataatccaaaacagtgggtgaatttaaaaataaattggattctacggtgcaccatactcttggtcatgtttatacacatggattagtgttatgtgtatatgtgttgaaatgaaacatcttatatgtacacgttaaagtgtttgcatttcctgagatgtgacaatcaatcattgtaaggacagaaatcttggaaacattttgggtaactaatatgtgtctgccatttattcagattttccaaaaatattcttggagcatcttttaccattataggctattaggatgtagtcatgattaaaatagtctacttgaattatatccagaaggtagagctgttaaaattataaataatcatcatgacaatgttagattcttagaatacatagagcagcaatggcattatttcccaacataagccccagttgggacagcctctctgaggaagtgattttgtttttcttaactgtttattttgaaaacatgtcaaatctacagaaaagctgcaaaaatggtataatgaactcccatatttcctccactttgcttaaccaattgctaacattttgccctcttctgtatgtctctatctcaattttgttgtgaaccaattaagagttacaggcatcttgacccttctaaatccttcagcctgtgtttgctaagaacagtgccatttggagcatcaccatgacacaatattacatttaaggcatttaacattaatacaaaactagaatctcaaagcaatccatattctaaatttgccaattgacccagaactgtcctttttaacaggaggaagtgaatttgactaataaccaaatgttgagcccgacatagcctcataaaagggatttatgggaatcaagaaagaaggaacagaaaatccaaagacatctacatatttgtatacatttattttaaaaagcatagacctagccaatattcttgggataatattaacaataaaatgtggcttgaaataggctaattaaaaatgtttagtgtaaaattacatgtaataaccttgtaaaaattgatactcacatattatttctatttggttttcctccattttacccatgtactctttatttgcttcttgataaagtcagttaaagcaatctgccacatagctccatgtgtgagatttaggaaaattgttgcctgcagaatttcaaatatggatatgaggcatttggaagcaatttctgataagagagtaccataaattgctaccctaaagtacattggtcacattacccaaccaaatgtttttacttaaacaagattcagagggaggagggatgtattcaccacaaaacttaatggactacagtgccattacttattaaatagacctatttatatgaaaaatgaacacttaatgtatacatgcagataatgtaatcccctttatcttatctatatacatggaagattcttattaccatcaatctggtggtccctttttgctcattccatttgcttgagaactgtgtctggattaataatgagtatatttcccaaaatgagcatagacagaaggcaaactggccctttcccaaggacaaagataatctctctaggactttcagagggaccaaaagtcagttggccctcattgggatcatggaaagtttttaacatccttcgtgtccagcagaggaacagcctgaatgtctggttctttctaaccttttaaaatgataaaataaatccaaagtattataggccatctggtacttacaaggcaacgtctccagataagtctgagcaaagggcaggcatattactccccttgggagagcattttggttatattcattctatttctcttgcttgatcatgaccaaagatatcacaaaaacctcctctactgatacagtccccttttttcactcttgaaattgtcgttattcttaattattgtctagattacatattttttaaaattatcaaaataaaagcaaaggtgatgataactctaaaagatatgtcacatacatattttaaatcttacagacatttattgcagcattgtaaaaacctacaaaatgcccaaaagaccaacaagaatagaatgagtaaataaattaacttaataaatattagcgagattagtcatattaaaggggaacacagatgatacacacctatgccaaaggagggccatgatttacagagtgagggggaaagaatacaacaaaacaaaaaccagatagccaattgcaaaattagagtagtcctttattttaaaaagaaaacaagcactgtatgtgcttatgtgtgtgccagtgcatggttatttatatgtatgtatacacgtgtatgtgtgtataggtctgtctgtgtataaatgaaggaagtctggacagacaccagctaagctgttgagaggagttctctaacctgaatatgccacttaaaaaataaaaagctgtattagtctattctcacactgctataaagaactgccgaagactgggtaattaataaagaaaagaggtttaactgactcacagttccgcgtggctggggaggccttaggaaacttagaatcatggcagaaggcacctcttcacgggacagcaagagagagaatgagtgccgagcaaagaggggaaagccccttataaaaccatcagatctcatgagaactcactgtcacaagaacagcatgggggtaactgcccccatgattcaattacctcccaccaggtccctcccatgacatgtggggattatgggaactataattcaagatgagatttgggtggggacacagccaaaccgtatcacagagatgtaatcgtaaggtgataatatgatttggctctgtgtctccacccaaatctcatgtccagtcgtaatctccattgttggaggtggggcctggtgggaggtgattggatcatgggggcagttgctaacggtttagcactgtccctgtagtgctgtttcatgatatagttctcagaagttctggttgtttaaaagtggcactgctcccctctctctcctgctccagtcatacgagacgtacctgcttaccattcgccttctgccatgattgtaaatttcctgaggcttccccagccatgctttctgtacagcctgtggaaccattagccaattaagcctcttgtctttataaattacccagtcttgggtatttctttatagcagtgcgagaatggactagtacagttagtataaagagctggcagttcagcaagtacccagtctagccccgtgttcttggaacatgtgccttattaaataggcagtgaaaattgaatccagattaagctccctgagtcttttaagaaatggtaatttggccaattatttaatttaaattaaacaaaaacagcacaataccacccacctactttcctcttaaacatttggatattttagcacagaaaatctgagatgatttaattacctcacttgcatgttgttgacaactgaagatgagatgacattcatttaaattctaagcttaatttattccaggccatgtttttaccaattttcattaatggtaatgtaagaaaaggttcaaaacttataaactagattttcacaaaactaattttgagttgaaagttggagtataatctcatcattgggttactggagagtagggcaaagagaaagacactgactagttgtgactattattcttttttgtaccactttttctgtggatacttgtgtagttaagtatgacttctaaggttgccttctgctgccttttggttgttttccaaagcttagaacaggacaagaggagtccttatgataggaatcctattctaagtaaagttctcaccagctgtgcggacattatgaccctggaggttctgccagaggtagttcattgctcacatattacttgcataagattctagctacatgaagggctggtagatcaggctattggagggagaacagtagctgtgctgtgtattttataaccgcacaccacaatggaaaaataaaataaggtgcgtcttttttaccttcagccaactgagacgaagattttcttaaaaggaccattttgggaactagacctatgccctccttaagtttggggaacacaggagttagtatctgatgttcaatggaagaatctaaagaggaagggagagggtaatagagcaaagagaacaaggtgcattgcaagctgactgtaccttcattaaatgtagagcaagagagtgtggaccagacattgcctgccatgcccgaagggagctgttccagggctgtcttcgaagagacccagccaatgaggcaggagaatggcgtgaacccaggaggcggagcttgcagtgagccgagatcgcgccactgcactccagcctgggcagcagagcgagactctgtctcaaaaaattaaaattaaaattaaaattaaaaaatagaagagacccagccaagaggaccagtgtccaccgaggaagaagtccagttgatgataaagaaggcattgttcttgtcaagtgaacaagtttggacactccagaaggacccctctaagagatttaagaataccctagaaattggtcctccactcggatgagatgatggtccaaagccagattacaacagttccttcattgacatggtgcttttcttcaccaaaggagtgcacaagacacctttctgaagatttcacaatacttaaaaaaaaaaatgaactctcctcagagtgtcttttataaatgtatgaggtagaataaaaaattaaataagcagtagaaacttatttaagacagttccactctggcaagacctttatttttcttattactcctctctcctccatgcacccaaccctatagcaaccatacgtagctgctggtgaggaggaagggaccctgaggaagaaggaagaacccagtctacaagtgaatggagagagagaagagttaagattgctgaaggactggtggtttactatagcacggatggagctttttatttaccaaaatgactcttcttctaactgaaggaacattaaaaaaatgacgtgttttgcaaaagacttaatccaggatagaaaaggggatagcacagaagaggagtttgaaggagcagaagaaaaaaagaataaaattattttctgttcacactctgccaagtccagttccttcaatccatagattataaattactgttttaaatgagtttctaccgctacatttataaaaaactctgagcaagtcttcattttttttttttaagtgtcgtgaaatctttcagaaagatgtcttctgcgctcctttggcaaacaaaagcacaatatcaatgagggcatctcttctacaaggaaaagtcatgttaaaaaaaggactgcatcggcagacattcgggacactattaaacccgtaattccttctattatgaataggaattatgtgtgaacatcaaaagaaaaacgaattctgcctggcatgctatcatttgctattgagagattctggactttaatcataaaccttgaaaagaggccatcacaccattcacaaaggggaaccttggtctggaccgttcaacagagttagaaatgatacctgtgttacttgaaagaatcaaacaaaagagcctccaattagcaagcattccattttgcattttagtatatgtatttgtgtattaccccaaaagcaagtcatatacatagatgtcagaatttgcaaactcacagccccagggatcactgtttgccagaatggtgttttgtttttgttttttactcatgttgtttctgttttatgacatttttttattgaggtgtaattaacattcaatgccagatatatttaaaaagtagaatttgatagaattctgtgtatgtgtatgcctgcaaaatcatcaccacagtcaggatagtgaacatatccatcacctccaaatgtatcctcatgcctctctgtattagctctctcctacctaagcaaccctcagtctgtttcctatcactgtaggttagttctctctaaaggtttataaaaattgcatcatacaggatgtattattttttgttctctttcacggaatataattatgttgtaatccatcaggttttagcaggtattaatagttcatttctgtttattactgagtagtatatcattgtatagatataccacaatttgtttaccatacctattgatggatttgtgggttatttctattacttgactactgcaaattgtttctctgaatatttgtgcacaaatgtttgtatgaaaagaagtttaattggcttatggttccacaggctgtacagaatagcattacctaagagagaataatgtgtacatttttctctcttaggtaaatacctaagagtagaatggctagatcgtatgataggtatatttaggcttttaagaaactgttaaactgtgtttccaaagtggtcgtgaccttctaatttctaatcaccattttattagtgttctaattccttcacatacttattgtttggtattgtcaatttttaaacttcaactattgtaataggttgtagtggtactcattggggttttaattcacattaataataatattgaacatcctttgatgtgctaatttaccatctgtatatctttggtgaaatctgttcaaatcttttgtctgtcgagttctttcttttcttactgagtttggagagttctttatatgttttggacacacgtactttatcagataggtgccagtcgttttgttttcttcatgtagtcttttgaagagcggaagtttttaattttgaagtcaaatttatcactttttctttaacgggttttccatgttcctgccttttggagattactatttgttaagcatgcccaatgctttgaaaaatattgcattaagtattatctctgcccaggttttttttttttttttttttttttgttgtttcaagggggtatagtgaatccagtttctattacattttagccagctgcagaaggttggttgttactttaagtttttctggccaatatttaacaatacacagacatataaatatctacataattagattcccttgaaaattatctggccatgcagtggtcacatccctgcacaaaacaggctggaacagtgtgacctgcagtttggttacctattttccccattaaacttaatgagtccactggtagaaaatgatattaatggcaacatggttactcagcttctctatgtacccaaatataaccgtttatctaggtaaattgcatgggcaaagagttttagtcatttcattaaaaaatcatcccttactattaaatggaaaaaaaaaaagcacatctgattagaaatggtgaaaactattacctttatttgcaaagaaaggaagaatggacatttttagtaccaggcatattagtaccaggtattttaacacacaatattcagtaaaaccaatgcattcaagtcctaaagcaatgctatgattaattcattaaaatacatatttattagcacacaatgcacaagaggaactgcctgatgacggaggtgggcatatagagtgttcggatataattatcatctcacaggtgcagcctcccggcaattctggaagacttgcagcctgttcttgcaagccctgttcttccaggcttgggagctggttaacttatgaaaaatataattattcttttcaatggaaattgcctgagggtgatacagattggacatatcagccttcattctaatttggtagttttgcgagtattatccaattgcttctgagacaggtcaagctatctcctctggatgtgtggacagaaatactttctctatttaattcctatgaggtggttttgtaactactcccacttattgttcagcctggttactgtgccaggactgatgagaggtataaaataaacaacaagcaactcttaaagatcaagccaatttggacttagggcctggcacggaattaagtcatagtaaactagaatgaagctgaagcttcacgggcttttagggctgaatagacttttttttacaggcacagaattatgtatgtcaaagagttcatttaaggtcagaaataggtctttgcattcagtcttagccttgtatatatgatcagtagtctcttcctcaccctgccggtctctttcaacacaagggcagctcatactagtccttataagcaggtaagagattgagttttatcctaaagtagtagaaagccatgaatggtggtgcctgcatgtggcttgatcagactgtgtcttgaaaatatccctctaactcccagactcaggttttacatgtgttaagaaaaaaaacaattaatcatagcacaggtgtagttataagcactaaataagagaattcatgtaaaaagcctagcatattgcctgtttgtaacctagacccacaacaaatcttgattgtaaatattgaagcatgtatatctttgcttctttactcactccttcactacactgcagttccatgagaacagagaacacatctaacttagctgactataaaatccaagtgcctagcacagagaaggaaatgagtaaacactgcctgaaggagtggataaatggatatatgtgaacatccagaaaatatgctgggagactttctttcattgaactcatcgcaatcttatgcgcgtgtgaatatttgattaaggtctggatcctgcacttgactataggcccatagaggcaaacattgtgtttttcctgctcactcattgctgctttctgagcatctaggggtgtctggtacatagcttttgattgtaagtatttgtagaataaattaatatagtgggtgcccctgttttaccgggggatgcacatagtcttttaagtggtaattgagtagttatcttgataaacgtctatctcctcccctagtgcgtaagttcactgagggtgggatccacttgttttgaccagccctccagtgcccaacacagcacctgtagcatagaaaatatctaatatatattatggactggataacatagttcccaaatgaaagataagtaacatgctcaattaatttcatattcaggaagagttttggaaagaatttatgttccattgactattttattttatttttggaacaaaatattgaacaatctggaggtgaaaaaaaaattattctttgaaaattcacacttttgagaaatctcaagaggcccttctttccccttggtattaaacaaggccaatgatattaccaagctgaagctaaactggcatgaattattcagagcagcaggaaaagcagctgctcatcctctctgtccataattttgaagggtggagaattggagggcagcactgacaacaacaggggggaagaaaagataaattgttgccctaaacctcataagctacaacatctgcagcactatgtttaatttggaagcagagtccacagtgtctgccataggtaacaaggacaaaaaatggtagaaagcttatgaatgtgtgcttggatagcaggagagagagagactgaggaaaaccaggagggaaaggaagagaagggaatggggagagacagaggaggaagagacaaggagagacagccatccaccctagaaggcaggaggaaaaatttgagttgaggaacttcagggaaatataaaatttagagatgggtataagaaaaatattttcaaattaaaatgtgctataaaattaaaagaaaaagatctggctttaagcctggctgcagtggctcatgcctatgatttcagcactttgggaggctgaggtgggaggatcacctgaggtcagaagttcaagaccagcctggccaacatggtgaaaccccagctctattaaaaatacaaaaattagccaagcatggtggcatgcacctgtagtcccagctactcgggaggctgaggccggagattcacttgaacccgagagacagaggttaactgagccaaaattgcgccattgccctttagcctgggccacagagcaagactccatctttaaaaaaaaaaaaaaagggggggggaggggaagatctagctttgaactgaagaaattccctgcctcctagatcatttctacctctttgacacagaggatgtttttgagtattttagagatcttggggtccagcagagtggaagacaggaaggtgctatgggagagaggaaggggtagggaagttgtggctgcgactataaatattgggaattttagaactaggatgcactttagaggtcccaccatatggtcctgggttgtagaatttgagacatgtccgattttcttcttgattaaaatgacttttagatgatggatatattgatctatataaaacaatctaggacctacaaagttgtatttaaatcaacctgaaaactttctgaccacatcatctgctgccctttgttgaaattcaagagcagactgtcagtcagtaatgggaatagagccgaacatgaaatacagtgctttttggtggagaaggggcatgtgatcagtgtctctgtagagacagcactgtgaggttaagaaaccaagtaaggcccatgcagcctttcataaaagaaaatgtgaaataaaaagaggacctacaaggcatgaatcctattacattggttgaaaacaatttaaagacaaaattagaagtcacccttttttgacaacccataaacacatacttacatgcatataaacatatgtatatacacacattaaacattgatagaatttctctttttaaagcagtggttttcaatcagaaatggttttcctctcaaggaacattagacagtgtctgaagacatttttggttgtcacaaatgagtagggagaggtgttattggcgttgggtggggacacgctaaggataccatcaacatcccatagtgcacaggacaacaggaatggcctggcccccagtgtcagaaggggagaagttgagaaacactcaaggaagaggaataacagagaaattatcttagtaaaatagcagaaactgtcattattgtgccaaagccttgtgtttgagtctttatgacctgcatgactaattctcaaaacattccttaaaaggtcattgttagcatttgcttaaagggaaaggaaatctaggagaggttaattatccaaagccactttgctctaaggaggaaatacagaatagcaattcaggttggttgtactcacacagctggcctcaaatccctcataaggaaggtgctatctttgcaaagaaaactactttgataaaagaggtgaattttaatgaataggcctcaggtaaagatagaggcgaatccataggaaaaaaaaaaaacttgatttgaactgcagaacaaaataagtaatactttttctctctataaaaatacagtaaaatagattttttctcccttccagtttggctgaggcaaagagacaatatggaaagtacctttatattccaaagtgatattccaaaagtcaaacttacaaacttacaggtagttggaaaccacttttgtgtatcctgttccagctgtaactgaagcttgaatggctgagacagaagagttggagaggagaggaggattttagagagagccataggtataccgtgagtcttgtcaccccaactaggaaggcatggaatacttttctgtcacctcaatcctagcgaaagaggtggaggcttcatgtgtttttgagcttgtgggacaaaggaggctgctgttgcaactaggcctgagaaatgtgaaaggatcatgtctctgcacagttagccacttggccttacagttgctgtgaaggaatggcctttgatccccaggtttgccacaacaaaagtgcatgaatgctcactggtcaacatgggtggcatctcagtgacagagaaggaccttgggttgtcttgcatcctaaccaggagtgttacctggatagatggctcatactcaactgaaaggctgaatgaccagaggttgatggaggaatcctgagctgattattatctgagactattggagctagagatgatgaaaaagctggagccaaacctctaatgtctcagaagagaccaaaaaaggaaacagaactctcctcacgtgttgggtggtactcatatccactatgttctaatctaatgggtctgagactttgctggcctctggattaactaaatacaacaattaattgacaatcaagatctgattattattttttgagacagagtctcgctctgtcaccaggctggagtgcagtggcacaatcttggcttactgcaatctcagcctccccggttcaagcgattctcctgtctcagcctcctgagtagctgggactacaggcacacatgaccacacccagctaatttttgtatttttagtagagttggggtttcaccatgttagccaggatggtcttgatctcttgacctcgtgagctgcctgccttggtctcccaaagtgctgggattacaggcgtgagccaccgcgccaggccaagatctgattatttaaaaaatgtgggtcctattctgaaggactttcaaatttaataagagggaaaaaaatctgatcaccaaccattgactaaggcaaatggtctaacattcaaaaattaaaattctcactttaaattgttatttttacagctttattgtggtataagtgacatataaaaactgcatgtacttaatatatacaatttgatgagtttggatatatgcatacaccagtgataccaccatcataataaaggtaataaactatccattaccttcacaaattttcttctgtacctttataatttttgtggtaagaacatttagcatgagatctactctcttaactgtttttatttcttttattcttaattttgtgggtacagtttttaagtgtacaatgcagcagttaattacagacactatgttgttcagcagatctttagaacttactttgtatgactataacttgataactatttaacaattttctatttctccctctcccccatgccctggaaaccaccattctattttctgcttctataagttcaactatttaatatactttatgcaaataaaatcatgaggtattttttcctctgtgacaggcatttcactcagcataatgtcttcctggttaatccatattgttgcaaatgataagatttattgattttttttttttttttttttttttttttttttttttttgagacggagtctcgctctgtcacccaggctggagtgcagtggcgggatctcggctcactgcaagctccgcctcccgggttcacgccattctcctgcctcagcctcccaagcagctgggactacaggcgcccgccactacgcccggctaattttttgtatttttagtagagacggggtttcaccgttttagccgggatggtctcgatctcctgacctcgtgatccgcccgcctcggcctcccaattattgattttttaaggctgaataatattccattgtatgtgcatatcacattttctttgtctttattcattcatctgtacataggcatttaggttgcttccatgtcttggttattgggaataacactgcaataaacatgagagcacagatcatattttgagtttctaacttcagttcctttggatacatagccagaggtgagattacagggtcatatggtagttctatttttaattttgttgaagaacctcaatatattttcccgtagcagctataccattttacattcccagcaacagtgtacaaggatttcaattttctcacaaccttaccaacacttatttttttatataatgattgtcttagcaggtctgaggtgatagcatatgagaagcaaaaacttccgaactatttttataaggccagtaataccctaataccaaagctacactaaaacagtgtaagaaaagaaaattgaaggctaatacaccaataaacatagaatgtaaaaagcctcaacaaaatcctagcaaaccaaattcaacagcacagtgaaagaatcatataccattatcaagtgggatttatccctaaaatggtttaacatatgcaaagctataaatgtgatataccactttaacagaataaagtataaaagtcataataaatgcaggggtagcatttgactaaattaaatacccttttaatataatgctcaacacagtaggtataaaaggaatctgtatcaacataataaaggccatatatgaaaatcccacagctaacatcattctcaatgtagagaaaactaaaaatttttcctctaacatcagaattaaaacaaggatgttcactctcatcacttctatgcaaccttgtgctggaagctccagccagagcaattagacaagaaaaagcatcaaactcggaatgagagacggaaagtcatcactgttggttgaggacatgatggtataagtagaaaatactaaacacctcacaaaaaaccttagaactaataagcgaattcagaaaagtttcaggatacaagatcaacacaaaaaaatcagttgcattttatatgctaatagtaaaatatctataaaatatgaaaacacaatgtcatttacaatagcatcacaaagaataaaatacataggaataaacataacaaaggaggcaaaaagcatacactcattgatgaaaaaattaacatgaataaattggatcccatgttcatggattaaaacaattaatattgtgaaaatctccactctgcctaaagcagtctacagattcaatctatttccttcatgatcctaatgacatttttttaaagaactagacaaaaataatccttaaatagctaaaacaatctttttaaattatactttaagttgtggggtacatgtgcagaacgtgcagttttgttacataggtatacacgtgccatggtggtttgctgcacccatcaacccgtcacttatattaggtatttctcctagtgctgtccctccccaaactctcccaccacctgaccggccccggtgtgtgatgtttccctccctgtgtgcatgtgttctcattgttcagctcccacttatgagtaagaatatgtggtgtttggttttctgttcttgtgttagtttgctgagaatgatttccagcttcacgcatggccttgcaaaggacatgaactcatccttttttatagctgcatagtatttcgtgtatatgtgccacattttctttatccagtctatcattgatggacattagggttggttccaagtctttgctattgtgaatagtgccacaataaacatacgtgtacatgtgtcttaatagtagaattatttataatctttttggtatatactcagtaatgggattgctgggtcaaatgttatttctccttctatatccttcaggaatcgccacactgtcttccacaatgggtgaactaatttacactcccactaacagtgtaaaagcattcctatttctccacattctccccagcatctgttgtttcctgactttttaatgattgtcattctaactggcgtgagatggtatttcattgcggttttgatttgcatttctgtgatgaccagtgatgatgagcattttttcatatgtttgttggctgcataaatgtcatcttttgagaagttgctgttcatatcctttgcccactttttgatggggttgttttttttcttacaaacgtgtttaagttatttgtcgtttctggatattagccctttgtcagatggatagatggcaaaaattttctcccattctgtaggttgtctgttcatgctgatgacagtttcttttgctgtgcagaagctctttgttttgatgtgctgctggttcccatttgtcaattttggcttgtgttgccattgcttttggtgttttagacatgaagtctttgcccatgtctatgtcctgagtggtattgccaaggttttctttaggatttttatggttttaggtcttaggtttcagtctttaatccatcttgagtggatttttgtataaggtataaggaaggggtccaatttcaatttttttttgcatgtggctagctagttttcccaacagcatttattaaatagggaatcttttccccattgcttgtgtcaggtttgtcaaagatcagatggttgtagatgtgtggtgttatttctgaggactctgttctgttccattggtctatatctctgttttggtaccagtaccatgctgtttttgttactgtagtcttgtagtatagtttgaagtcaggcagcatgatgcctccagctttgttctttttgcttaggattgtcttggctatgcaggctcttttttgattccatatgaagtttaaagtagttgtttctaattctgtgaaaaaagtcaatggtagcttgatgggggtaatattgaatctataaattgctttgggcagtatgtccattttcatgatattgattcttcctatccatgagcatggaatgtttttccatttgtttgtgttctcttatttccttgagcagtgtttgtatttttcctggaagaggtcctccacattccttgtaagttgtattcctaggtattttattctcttactagcaattgtgaatgggatttcattcatgatttggcactctgtctgttattggtgtataggaatgcttgtgatttttgcacactgatttttgtatcctgagattctgaagttgcttatcagcttaaggagattttggactgaggtgatggggttttctaaatatacaatcatgtcatctgcaaacagacaatttgacttcttctctttctgtttgaatatgctttatttctttctcttgcctgattgcactggctagaatgtccaatactatgttgagtaagagtggtgagagagggcagcattgttttgtgacagttttcaaagggaatgattctggcttttgcccattcagtaggatattggctgtgggtttgtcataaatagctcttattttgagatatgttccattgatacctagtttattgagagtttttagcatgaaggggtgttgaattttgttgaaggccttttctgcatctattgaatcacgtggtctttgtcattggttctgtttatgtgatggattacagttattgatttgcatatgttgaactaggcttgcagcccaggtgcgaagctgccttgatcatggtggataagctttttgatgtgctgctggattcggtttgccagtattttatagaggattttcacatcaatgttcatcagggatattggcctgaaattttctttttttgttgtgtccctgccaggttttggtattaagatggtgctggcctcataaaatgagttagggaggattccctctttttctattgtttggaatagtttcagagagatttgtatcagctcctctttatacctctggtagaattcagctgtgaatccatctgttcctggactttttttggttggtaggctattaattactgcctcaatttcagaacttgttattggtctattcagggatttgacttcttcctggtttagacctgggagggtgtatgtgtctaggaatttttccatttcttctagattttctagtttatttgcatagcgatgtttatagcattctctgatggtagtttgtatttctgtgggatcagtggtgatatcccatatatcattttttattttgtctatttggttcttctctattcttctttattagtctggctggcagtctgtctattttgttgatcttttcaaaaaaaccagctcctggatttattgatttttgtgaagggcttttcatgtctctatctccttcagttctgctctgatcttagttatttcttgctgtttgctagcttttgaatttgtttgctcttgcttctctagttcttttaattgtgatgttagggagtcgattttagatctttcctgctttctcttgtgggcatttagtgctataaatttccctctacacgctgctttaaatatgtcccagagattctggtacattgtatctttcttttcattggtttcaaagaacatctttatttctgccttcatttcgtcatttacccaatagtcattcaggagcaggttgtttagtttccgtgtagttgtgtggttttgagtgagtttcttaatcctgagttctaatttgattgcactgtattctgagagactgtttgttacgatttctgttcttttgcatttgccgaggagtggtttacttccaattatgtagtcagttttagaatcagtgtgatgaggtgctgagaagaatgtatattccgttgatttggggtggagagttccatagatgtctattagggccacttggtccagagctgagctcaagtcctgaatatccttgttaattttctgtcttgatgatctaatatgcagagtgaggtgttaaagtctcccactactattgtgtgggagtctaagtctctttgtaggtctctaagtacttgctttatgaatctgggttctcctctactaggtgaatatatatttaggatagttagctcttcttgatgcattgatccctttaccattatgtaatgcccttgttcatctcttttgatctttgttggtttaaaatctgttttatcagagattaggattgcaactcctgcttttttttttttctttccatttgcttggtatatattccatcctccctttactttgagcctatgtgtgcctctacatgagacaggtctcctgaatacagcacactaatgggtcttgactctttatccaatttgccagtctgggtcttttaattggggcatttagcccatttacatttaaggttaatattgttatgtgtgaatttgatcccacattaggatgctagctaattgttttgcccgttagttgatgcagtttcttcatagcgtcttcaatgttctttacaatttggtatgtttttgcagtggctggtactggttgttcctttccatgtttagtgcttccttcaggagttcttgtaaggcaggcctactggtgaaaaaatctctcagcgtttgcttgcctgtaattaattttatttttccttcgcttatgaagcttagattggctggatatgaaattctgggttgaaaattctttttttttttaatactttaagttttagggtacatgtgtacaatggacaggtttgttacatatgtatacatgtgccatattaatgtcctgcacccattaactcgtcatttaacattaggtatatctcctaatgctatccctcctccctccccccaccccacaacaggccccagtgtgtgatgttccccttcctgtgtcaatgtgttttcattgttcaattcccacctatgagtaagaacatgcagtgtttgattttttgtctttgcgaccgtttgctgagaatgatggtttccagcttcagccatgtccctacaaaggacatgaactcatcattttttatggctgcatagtattccatggtgtatatgtgccacattttcttaatccagtctatcattgttggacatttgggttggttccaagtctttgctattgtgaatagtgctgcaataaatatacgtgtgcatgtgtctttatagcagcatgatttataatcctttggttatatacctagtaatgggatggctgggtcaaatggtatttctagttctaggtccctgagtaatcgccacaccgacttccacaatggttgaactagtttacagtcccaccaacagtattaaagtgttcctatttctccacatcctctccagcacctgttgtttcctggctttttaatggttgccattctaactggtgtgagatggtatctcactgtggttttgatttgcatttctctgatggccagtgatgatgagcattttttcttgtgtcttttggctgcataaatatcttcttttgagaagtgtctgttcatatcctttgcccacttgttgatggggttgtttgttttttttttttttttttttttttttttttgagacggagtctcgctctgtcgcccaggccggactgcggactgcagtggcgcaatctcggctcactgcaagctccgcttcccgggttcacgccattctcctgcctcagcctcccgagtagctgggactacaggtgcccgccaccgtgcccggctaattttttgtatttttagtagagacggggtttcaccttgttagccaggatggtctcgatctcctgacctcatgatccacccgcctcggcctcccaaagtgctgggattacaggcgtgagccaccgcgcccggcctgtttttttcttgtaaatttgtttgagttcattgtagattctggatattagccctttgtcagatgagtagcttgcaaaaattttctcccattccataggttgcctgttcactctgatggtagtttcttttgctgtgcagaagctcttgagtttaattagatcccatttgtcaattttggcttttgttgccattgcttttggtgttttagacacgaagtccttgcccatgcctatgtcctgaatggtattgcctaggttttcttctagggtttttatggttttaggtctaacatttaagtctttaatccatcttgaattaatttttgtataaggtgtaaggaaggcatccagtttcagctttctacatatggctagccagttttcccagcaccatttattaaatagggaatcctttccccatttcttgtttttgtcaggtttgtcaaagatcagatagttgtagatatgtggcattatttctgagggctctgttctgttccatttgtctatatctctgttttggtaccagtatcatgctgttctggttactgtagccttgtagtatagtttgaagtcaggtagcgtgatgcctccagctttgttcttttggcttaggattgtcttggcaatgcgggctcttttttggttccatatgaactttaaagtagttttttccaattctgtgaagaaagtcattggtagcttaatggggatgacattgaatctataaattaccttgggcagtatggccattttcacaatattgattcttcctacccatgagcatggaatgttcttccattttttttgtatcctcttttatttctttgagcagtggtttggagttctccttgaagtgaactcccattcacaaatgcttcgaagagaataaaatacctaggaatccaacttacaagggatgtgaaaattcttttccttaagaatgttgaatattggcccccactctcttctggcttgtagggtttctgctgagagattcactgtcagtctgatggccttccctttgtgagtaacccaacctttacctttctatctggctgtccttaacattttttccttcatttcgaccttggtgaatctgacgattatgtgtcttggggttgctcttctcgaggagtatctttgtggtcatctctgtatttcctgaatttcaatgttggtctgtgttgctaggttggggaagttctcctggataatatcctgaagagtgttttccaacttggttccattctccccgtcactttcagtacactaatcaaacatagatttggtcttttcacatagctccatatttcttggaggctttgtttgttccttgttattttttccctaatcttgtcttctctctttatttcattaagttgatcttcagtcactgatatcctttcctctgcttgatcaattcagctattgatacttgtgtatgcttcacaaagttctcatcctgtgtttttcagctccatcaggtcatttatgttcttctctaaactggttattcagttagcaattcgtccatccttttttcaagttcttagcttccttgcattgggttagaacatgtttctttagcttggaggagtttgttgttacccaccttctgaagcctacttctgtcaattctccaaactcattctccaaccagttctgttcccttgctggtgaggagttgtgatcctttggagaagaattgttctggtttttgcaatttttagcctgtttgcgctggtttctccccatctttgtggatttatctacctttggtttttgatcttcttggtgacctttggatggagtctttgagtggatgtgctattcctttgtttgttagttttccttctaacaggcccctctgctgcaggcctgctggaaattgcatgaggaccactcctgaccccgtttgcctgggtatcaccagtagaggctgcagaacagcaaagatttcagcctcttctttcctctggaagcttcatcccagaggggcacctgacacatgccagccagagctctcctgtatgaggtatctgtcagtgcctgttgggaggtgtcacccagtcaggatacatggtggtcaagaacccacttgaggaggcagtctgacccttatcagagctcaaacgctgtgctgggaggtttgctgctctcttcagagccgtcaggcagggatgtttaaatctgctatagctgcacccacagccaccccttaccccaagtgctctgtcccaggtaaatgggggctttatctataagtccctaactggggctgctgcctttttttcagagatgccctgcccagagaggacaaatctgtcagtccagccacagcagccttgctgagctgcagtgggctccgcccagttcgaacttcctggtggctttatttacactgtgagcataaagccgcatactcaagcctcagtaatggtggacacccctccccacaccaagcttgagtgtcccaggtcaatctcagactgctgctgtgctggcagtgagaatttcaacccagtggatcttagtttgctgggctccatggaggtgggacctgccgaatgagactgcttggctccctggcttcagcacccctttccagggaagtgaatggttctgtctcactggcattccagctgccactgaggtatggagagaagaaaaaaaaaaaaaaagacttctgcagctagttcagtgtctgcccaaatggccacacagttttgtgcttgaaacttggggacctggtggggtaggcaccacagggaatctcctggtcttgagggtatgaagaccatgggacaatcgcagtatctgggcaggagtccccagttcctcaggctcggtccctcacagcttcccttgggtaggggagaaaattccccaaccccttgcacttccctgatttgactcaccctccatgggctgcacccactgtccaaccagtcccaatgagatgaaccaggtacctcagttggaaatgcagaaatcacctgtcttctgtgtctgtctcactaggagctgcagacaagagctgttcctatttggccatcttgatctcaaacctgtttctggactttttaatgattgccattttaactggtgtgagatggtatctcattgtggtttctatttgcatttctgtattggccagggatgatgagctttttttcatgtttgttggctgcataaatgtcttcttttgaggagtatctgttcatatcctttgcccactttttgatggggttggttttttcttgtaaatttaagttctttgtagtttctagatatcagccctttgtcagatggatagattgcaaaaattttctcccattctgtaggttgccttttcactctgatagtttcttttgctgtgcagaagctctttagtttaattagatcccatttgtcaattttggctttttgttgccattgcttctggtgttgtaggcacgaagtctttgcccatgcctatgtcctgaatggtattgcccaggttttcttctaggatttttatgattttaggacttatgtttaaatctttaatccttcttgagttgatttttgtataaggtataaggaaggggtccagtttcagtttttttacatatggcaagccagttttcccaacatttattaaatagggaatccttccctcattgcttgtttttgtgaggtttgtcaaagatcagatggctgtagatatgtggtggtatttctgaggcctgtgttctgttccataggtctatatctctgttttggtaccagcagaatagctaaaacaatcttgagaaagtagagcaaaactgaaatcatcacacttactggtttttatttagaaattacacatctacactaattaaaatagtatagtactggcataaaaacaaatagaccattggaatagactttataggcacacttacacatacagagtaacttattttaaacaagagacacgaatacatcagaaaaggataatcttttcaacaaagggttttggaaaactggaaatacacacacataaatagaattggaattttatgttacactatacaaaaaaaaaatcacttcaaaattggttaaaacctaagaccataaatcccctagaagaaaacataggaggatagcttcatgacattggtcttggcaattaattgatgggtatgacagtaaaagcacaggcaattagagcaaatatagacaagtgggaccacatcaaacttaaaaagcttctatatggcaaagaaaatagtagagtgaaaaaagcaatctacagaatgggagatattttcaacttacatctccaaagggattaatttccaaaatttttaaggaactcctacaatcaatttgatagcaacaacccaacaaccaaacaacctggttgaaaaaaaggagaaaggacttgaataggcatttctccaaaatggccaataggtataggaaaaagtggccaacatcacatcatcagagaaacgcaatttgaagttgcccttttaagaatggctgactcaatagatgtcctacacataagactgtggcaatttaaaaatgacggaagcagtcagcttgctattatcttgatctacacaacaccaaattactggcttgagtttgttgtgccttatttttgttttgttttgtttgttttgtccttgtttaagtaaaatcaactagatatcttaaccttctacaaacccaggctgaacaacagggatgacttagaaatcttaatacaagaaaagtgattaagggcagggatacaatgtattattattccaacatgtaggggcatcagtatagtggtacaatgattttccaacaacctaaaagccagccataaatcaaagagtggatattttttattgcctgtgaaatggtcaccaaacataatacatttcataaacaattacctctttttttggttttcatttgataaaattgttgcttaaaaatgtttggttcaaaattaacttttaagtgtcttaattttataattatggtgccaaataatcagaattagtagaataaaaattggatcataaaaaatagaaactctaataaataaatcctggtatcttttctatggctactcttgcttagctttttattgaactttgggaactttttccaattctcagtgacactttttaaaaaattttggaacaaatcagaatacttggtgtgttagtacaggaactattttttaaatagaatacatatggaaatatagagattaagtacttaaaacatgtaattatgagtagttattaggtaactaattttgataattattagagaactaattctccaaccttatttgcatcacaattacttggagggcttattaaaatggatttctggacctcacccccagcatttctgattcattagatctggcatgaggcttgataatttttaatttcctaggtggtgctgatactgctaatccagggaccacttttggggaatcacatattagtttatgtttttgtctatattctgaggttgtatgctttctagagttgattgtgctgtattttaataaaacgtgttattttctttttcttattaaaaaatggacaaaatccaatgtagcttttaaaaaatctattgtttttggaaggaaatgctttctctgaaacaagtagctgaattattgtgattagtggctagataaaacatcacactttgtttttcttcacacaaaagactatataaccagaagtccttgaaaaaaatatatacctgaatctcaatatgggaactcactaaaatcctcaatgcattacatgttaggatcaaggaggcaaataggtattttcccttggctgttggttttgtggataattcttaccagtcatcacacgagctcgccttagaacagggttggtaaacgttttaagcactggatagtaaatagtttaggcctgcagtacatgatgttgtagcacaaaagcagaaataggcaatatttacatgaatgaacatggccattttctaataaaagttgatttgccaaaggaggcagtggtccagatttggccaattagttggagttgcagaattctaccttagagtaagatactctcctctcaaacacctggtattcaatcccagtacccaaacctgggtagccttgtgaggagctttgaaaaacacccatgcccaaggctgatgcccagaattcaggtttggtttgtctgaggtgaggcctgagtgtctgtgtatcccgggcttcctgatctaggaaactccatgctggttaatgcctcagggccagaggaagaggtacaaaaactcgcttggtgccgaccgaagacttctctaggaggaagtgctatattttatacaagttaacttcctcttgattgctggagagactgatgcacctttggtcttcctctcctgctagaacacaccgcacatagcgatgccagtgggagaagcagctcaacagcaaatgagaaactctaaccagggtccccgacctcacaattttcaactagaggcttatccttaaaactactattaaggtgcctactgcatctttatatgtagtaaatattccccgacaggaatcacaggggctcttagtgccaggcttctcaaaatgtattacccagggatcatgctgaaatgcaggctctaattcagtagttttgagtggggcccaccattttgtatttctaacaagctgcaacacgtcgctgatgcgtctagtttgtagaccgtgcttcgagaggtggtcttagtagacggtcactgaatttgctctggagaatgactactaggaccttgagatgccgcctacccaacgttctacaaggtatatttgagcataccacaaccctgtattcaaggcagcgtgtcacaaatacacctgccacaagtggtgaaaacccacaacatttgatttttttttttttgtactgaggtagttaacaagaagacaggcaaaacaattttatttatgtaaagcatttcacaataatttgtaaacagtcaacaatgatgaatgaggttgtgtgagataaaatggttttttccatatcatactgtattgctcaagcccacatgcatctctgtttttgctgaacgttcacaatcagcggacatttttgccagtgcaacatgatgagactgtccttgtttcttaggtgggaggcttgagtccttaacaagaccatacatccttctatggtgaagtctgtatagattttgtggaagaaaaaaattggctttgtagctgtgtgttgtctctcagttgctgtgcctcaggagtgttcaggcattgcttacccgggtcctctgttctgaggtctccccaggctgtgtttcagatgttggcctgagctgcagcctcaccagaggcctgactgagaaatgatctgcttccaagctcctttaggttgttggcagaatttatcttgtggctgtaggaatagagtttttattttattttttaataatccaccaatggtcatctcagatctacagctcataggccatccaaaatgtcttgtcatgtgggcttcctcaacacaatggttcccttcatcaagccaacaaagagactcttttgctccagtctgataagacggaatctgctgcaatgtattctaatcaaggagtaacatcccatcacctttgccatataatggaatctaatcaacagagcagagcaatatatcatgatatttaccatgtattggaaacatgtcaatggtttcactgattctcaagggaatcagagtgtggatgctaggagaaggagattcctgggggatcaccctagggttttttgaccatagatgataaaaggtttggctttctgtatttcaaacaagcaagtaactgaaccatttctggttcatttgatacctatgtataaaatgggcacaaacacaaagccttattcatgaggctgataagaaacaaaatgagataccatgtggtatcatcataaagttttatatcaatattataacttttatgtttcctatacatttcaaagctaagaagatagtaaaagttgataaactttcaaattaataaaataattccattccaccttttaatcatagatcacaggatggccaactgcagagttttcagaacatcattttcagtactaccagttgggttaaacctcacaatgcataaaataatggaatagtgattaagaatgttggttgtaggatttcttcttccagtatgccagggaagctcctttcagtttacccttcttcatataactatctattctgaaaaaatacaaaaacaaccaactggagacactggagagtgaaccaaagccggctggaactggcagggagaagggagtagactgggtgagtttcccattatttagtggttttgtttgttttttatcctgagggcatgccctgtctgccctatgcaggaaagttaaaactatgatataaaaccttcaatcttggctgggagcagtggctcatgactgcaatcccagcactttgggaggctgaggtaggaggatcacttaagcccaggaattagagaccagcatggccaacatggcaaaaccccatctcaactaaaaatacaaacatcagttgggcatggtgacacacgctgtaatcccagctactcgggaggctgaggcaggagaatcccttgagcctgagaggcagaggttgcagtgagccaatatctcatcactgcaccccagcctgggtgacagagcaagactctacctcaaaaacaaaacaagaaaatccctgctgccttgctggcaggaatattaagagactagggaaagaggcaatcagagctgttaaaaagtgaaatggtggaaataccagaaaggaaaaagcccgagagaaggagcacaaaattctacccatcagctctccccagatcactggctgactccacaaacacgtgcgaccgtgtccagtcagcccatctaaggccagaaaaaagtgaactgaaatgcaaactgccacccaaagcaggggagactgaattttgtgatttgaattcagccaatttaaataaatatataaataaattctcttcagtggagcaaaaaatgtaaagtttctatagcatactttttacaatgtcaagtataaagtcttaattatttgatattatgaaaaaaaaaatgacttaccctcaacagaaaaggcaataaatggagacaaatcctaaattgatccaatattggaattagcagacaaagattttttaataactctgaaaactaagctgaaaatcttaaatattcttgcaataaaaataattaaatcttagcagataaagagacattaaaaataaaaattctaaaattttaaaatgtgacacctgaaataataaataaactgtatgagtttaatgacataaagaaggtagcagagaaaagaaccaggaatggtcgggcgtggtggctcaagcctataatcccagcacttgaggagggcagagcatttgaggtcaggaattcaagaccagcttgacgatgaacatggtgaaaccccatctctactaaaaatacaaaaattagccaggcatggtggcgggcacctgtaatcccaactacttgggaggctgagacaggataattgcttgaacttgggaggcggaggttgcagtgagccaagattgtgccactacactccagcctctgctgagtgaggctccactgaaaaaaaaaaaaaaaaaaaaaaaaaaaaagaaatgtgaagataaatcaatagaattatccaatctgaataagaggaaaaaagtaaaataataacaaatgataagagactcaaagacctgtgagagaataggaagaggtctaatttgtatattgagttttagaaaatgaagaagagagacaataaaaataaaagaagcaaggggggaagaaaagaaataaaaagaggtcaaatatttcctaaatttggtgagatcaatcaatttatagactcaagaaactcaacaaacacaaagcaggattgatgcaaataaagctatatataggcacatcatagttcaactgatgaaaaaaaggagaaccttgaaagcaaccagacaaaagtgacatattgcatacagggaagcaatgatttatctatccacacatttgttatcagaaataatggaggccaggagacagtggagcaacagctttaacattctgacagtgtgggttacggagtcagacaacatgacttaaattgtatggctactacttagtatctgtgtaaccttggacaagctatttgatagttccatatctcaatatattacctttctaactagtaatgttaaaagctatctcattctgctgttgaggaggttaaatgagttactaatacatgaaggttcttagtacttgatgaataatacaagcaaattcaatgcttgccattattatgatcagattttaatatttgtggtcaatttgagtgctttaaattttcagaaataattagacatgcataaagacaaatacctttttaaaaagatccaaaaaataagagtagttaatttaaattacccaaaacaatcaggagtttgctaaagaaagaatgatttccaaagggactcttattcaatctcatccttctttgtaccctctgcagcagaagttaaactatttcacagcaagaggaagccagttctcccccagccatagttgactccaacaaaatctctcactttctcacctcgggcttttgcctgcacttattccccagtacaggtaattagcagtcaaattcttaattactcaattagtccaacccacaatgctatctgaataaatcaattaatgtagctcccacagaagagcccatgtttacgacataacagttataatattgtcccagttaatcagcgcagaaccatgcagactctgatattgacaatgattgcctcggtccactgtggaattcattttgcacatgacagaaacagaagtaggactctaaatttacagcaattttctcattttttcttcctcagacaccatataaggaggtgagaattaaaatgctgagtggccgcaagtcactcaaatttagctactgatcaatttttaaaatgtattgcttgttttatttaaccaatgtaccctgatgctttgtgcctggttctttgctagacctaatagaagcctcttactgcataactctctcagcttcagtttccacaaagtgcaccagtgcttctcaaactttagtgtataaatgattaacccagggttcttgttaaagtggagtttctgactccatagatctggcataagcgcagagactcactaattcccaggagatgctaatgctaccgttgaaggaagctgacttggagcaccaagggtgtagaataaagattagagtgctcacttcacaggattgttgaggcggttgtgagatctgcgtggaacaatgaagatgacaaacttagcaagctctaattagagtgtgaagttcattgttagagacatgccttataaggaccagagtcttacaaaagagagaaaatacataagaggatgaagacttacaggagaaggaaacattgggaacatcagtagggtggggttctgaactggctttactactgatacactaacattttgatgaattcatcacttaaaaccttggatacatgttctttatgcattaaaataagccacttttgagagttttgtcattttcagatgctaaattgcctttcattatagattacttttaaatcagatcagttttgaaatgtactctttttccaagcaataattttcagaaaccacaggcaataatattttttctagcagattaaaatacacacataactaccataattcaaacaatccttccatatattccctaaggtatcatttcatatattatgaattatatgcattctttgaaaaacaatgcattagttaatttctgtaatttcttgacaaattaaggaataattcagttatgtttccagattatctgaatcttagaaaaatagggacttctgagaagaggtatcctgtaagctgacccttgaaaaacaagtaggctttacatttagacaatctgaaactggacttctgtgtgttggggtggggaggagaacgttgctgttcaaggaaagaaagaagaaagggcattcaggatacagggagtatcaagaatgtgagcagaggtgagaactggtgactgatttctaacctgtccaagagaaaaagcatgggtggtgttctaggacttgagggatagtatgaactgaaactccaaggttggagagaaacgcttacacttgagtccagagagaattttggatttgtccagttctcttaatattctgacaaactctctggactcctgcaagaaaaatgcacacagcacacacagagagtgcatgcacatgcacacatacgtttataatattttgaccacagtatcagggtgtgtatttctccctagggccaataagtgaaaaatctagagatctatagatcaaacatctgatagtgacagcttttggaaaattgcaactttaaagatttaaaattctgcccagtgtctcagcatcacggggcctcttctgagtcacacagctcctttacgatgttgggacagtgacagaaaatacaacccaaactggcttaggcaagagaaaacataaaactaatgggcagaaagaggtttagtttcagacaaaactccaaatcccgtcacaggaatcagcctgtcgtggggctgtgctgccctgctccacattaccctcaaatccaagttccacttgaggacaagatggtacccatatattccaaacctggattctctcagattcaaatcgctccaaggaaatcatgctaaattttaatatccatccatcctctaccagattcatatagtttctatgaagctgattctactcctggtctcaaatgtgccatgtcccttgggcctggacagtctgaaactaatttcagtggtgatacaaattggtttagagatgagtgtgtgactgtgtcaagattgctgagatgccctaagaatttcccgaggcttccaagacagagcagatactcttgacctctggatcaggacatgaggggatgtaaaggatggagctgctgcagttgctttgcaaccttgacaaagggatctaactgagatgggaatcagcaggtggaaatgacagtgagagaaacagaaacagtgagtgcaagcaagagagaaggtgttactgacatatgctgaaccactgatccagctgtgctggaaacttagtagctctggtctttttagttctatgacctacttaacctctcttggatctgtcaaaaagattcttgttaaaaagtgttttaggatagatgacttccaaagccccctcaagctccatactttctgtaacacatgtgacaaactatttacgtgaagttcgtaggtgtcccaaggattaggttcctgtttcatagctaataccatggttccccaagtccacataatttaatatatcagaaagtaactgagaccattaagagactcatctgttttgttcatctaattgctgattctgttttgctttgaagactaaaaatacctcaaatacttcccaccttttacaatctttattcaatgctcattgaagagtgatttctattgcttttgtttcttgtttattatttattgaacacacaattaactcacaatgcttttacagacatacctcagatgcatggtgggtttgattgcagacccctgcaataagacaaatatcaaaaggagtcaattttttctgtttcctagtacatataaagattacatctacattgtactgtagtcgattaagtttcaatagactaccatttatgtacgttatgtctagaaaaacaaggtatataatttaaaaatatttttttgcttaaaaatgctgatgaccatctgagcctctagcaactcatctttttgctggcggagggtcttgcctcaatgctgatggctgctgatggatcaaagtggtggttgctgaagtttagggtggctgtggcaatttcttaaaataacatcaatgaggtttaccacacaaattgactcttcatttcagaaaatatttctctgcactatgtaatgccatttggtaacattttacccacagtagaacttctttcaaaactagagtcaaccctcacaaagcctgccactgctttatcagcttttatgtaatattctaaatcctttgttgtcatttcaacaatgttcataatatcttcactagaagtagatgccttctcaagaaaccattttcttggctcattcataaaaatcaactcctcatccaataaatttttaatttaatggatgttttttaattctagtatttttttgatccttccaacacatcttcagttgtttcctccactgaagtattgagcccctcagtcatttatgagggctggagtcaacttcttccaaatttctgttaatgatattttgaccacctcttatgaatcataaatgttcttcatggcagctagaatggtaaatcctttccaaaaggttttcaatttattttgcccagatccatcagaggaatcactgtctgtggaagctatagccttataaaatgtatgtcttaaataataagacttaaagttgaaattactccttgatccatgggctacaaaatggatgttgtcttagctgccatgaaaacaacattaatctccttatacatctccatcagggcctttgaataaaaaggtacttcatcaatgatcagcaacattgtgaaaagcatcttttattctgagcaaaaataggactcctgattataggccagatggccgactagacacaggaggaacatcagccaaagagggaccaagacgccaggaagaatggcacactctcagcagatctttgcggggaaggcactgagagtgaacagagggaggacagacactaggctgaagagggaggaagctgggcaccctgcatagggatactgtgcaccaggactcattcctcgttcccagagactcctgaggaaggagtgagttgaacaggcaaggagtgacccactcttgccatggaactctggaatcctggcagcaagagaccccatgacctcagtggacacgaactggcaggaagagttgcttagagaggtgctagaggagggactgcagcctgtacagagcccagcaggtttggtgcaggaatatctgcaggtgagaattaaaaaacaatcaggtactatgcctattacctgggtgaggaaataatctgcacaccaaacccccgtgacttgcaatttacctatatgacaaataggcacgtggacccctgaatctgaaatacaaattaagaaaaaaaagtcaatagtggttttaaaccatgttcagtaagccacactgtaataaacacatatgctgtcacccaggctttattgttccatgtatagagcacaaacagtagatttggcatcattcttcagggacctaggatttttgcaatggtacctaagcactggcttcaacttaaagtcaccagctgcatcagcccctaagaagagagcctatcttttgaggttttgaagccaggcattgacttctcttcaactatgtaagttctaggcagcatcttcttctgatataaagttgtttcatctacattgaaaatctgttgttttactgtggctctttcatcaatgatcttagctaaaatttttggataaattgctgaaacttctgtgtcagtacttgatgctttgccttgcacttttatattatacagacagcttctttcctcaaacctcatgaaccaacttctgctagcttcgaacttttcttctgcagcttcctcacctctctcagccttcatagaattgaagagagctcagacttcattctagattagtctttggcttaagaaaatcttatggctggtttgatcctctatccaaaccataaaatgatctccatatctgcaataatactgtttttctcttatttatcatgtgttcgctggagtagtatgcttaatttccttcaagaacttttcctttgcactcaaaactttgctaactggcaaacaaggcctagtttttgacttatcttggctttcaacatgactcccccactaagcttaatcatttttagcttttgatttaaagtgagagatatgcaactcttcctttcacttgaacatgcagaggccattgcaggatgattaattgtcctgatgtcaggattgctgagactcagggactagggaagcccaaggaaagataaagagggagcgaagccaatcagtggagccgtcagaacacacacacaacatttatcgattaggtctgctgtcttctgtgaacatggtttgtggcaggccaaaacaaaatagtattatcaaagatcactgatcatagttctcataacaaatacagtaataaaaataaagcttgacatattgtaagaattaccaaaatgtgacacaaagggaacatatgctgtcagaatgttggaatggccctaacagactttctcaatgcagagtttctacaaacatacaatttgtttttttttaaaaaaaaaaaaaaaaactgcaaaatgcaataaagtgtgaagcacactaaaacaagctttgcctgtataatgatttggagtaagttgaaaagcatccaagttcatagaccctgaaaccacaaagtgaaataggaatcaattagtgactcaggcaatgcattacctggggaagagtgaagccaggtgaggcctcgggagttccaaaattagtttgtggtctggaatccacaggaagttccttatgcattaggttcgcagtgggatttggcctaatttctttgacaagtgagtaatttccaggtaaataaagcagggtgaacactacttagacctttttgtcagcccacctttcactcacatcaacagctgtccagtaaataatgacctcttttcatctgacctatggagcttagcaatttttctccatcaattttaagtgtcttaatctcatcacattggtttactgtagaagaaatttttttttttttacttatttttatttttaccttccttgattttagtcatttaaaaactgaggatgtataccatatgccttttggctgagcctgttttattaggcgtgatgtatttcaagggtgataaatcttttatttggtctggcctcagatcactgtgtttcttatcgctatagttaaagggaggtggtattcagaagcagaaagctagctagacttcaatcaagaggctcaggaagcagactcccaccttttctatcagctaatgataccttttcttgagtccaatagtcaagcataactacctcaggggaatagtgaaagaaacctgaatatgctacagtgcactgcagtcctttaaacctcccgatgggagtacaaacttccagtaatcacatacctggagaaaacatgagagttgtaggagagagagagatccaatccagcacctcctgtacttccttccaccatttctaataaaacactggctgggaagcagaatggttacaaattgttcattctgggaatcttgtataataacatacttcatatactttaagtgaactttgcaactaatttcagggatttttttttttttacttgctacagtccatagataaattctcatttgattttatacaaagcctagaaggcaccaatcaaatcaaataccaaccaaagttaaaattatgtggacatgaaagcatttggagtggagcattctctgcccccttgctttgcattctcttaatcatgttgccttccagggagggatgtcagggaagattgcttcttccataatgcatggtgtcttttttcttatcaatgccattcaatatcgctttcttcgggaagttccctgattcaccatcctcacagaggtgagcagcttcgtttattttgatcctggggacataggctgtgaaaggaaacaatttaccaagaagaaagaatgttgagggctacacacagatttattggtataaaaaaacaaagcaagtccagatgtgactcatttttgaggcatgttgtaaatacacctgacctgtttcatttataacaaaggaagatgccctggcttacagctgagttatttgtgtgttactcaacttttctctttttttcaggggagaactaaaactagagtttagggagtgattgatggggatttgaggattgtagtttttttcagtgctcctgttggctttctaaattactgcctcttcacaagcctaatcatttatcaccctcgcctcctacggtgttttacattttggcaactatttcctgcctttgccattgtaaggctaatatttaaaaataaggggttggtgatttttataattccacttagtgatattaatgaaaatgttgaaagcagcacatcaaaacaaaaaccaactgcttctagtttctgctacactgaagaattgtactgaccacctgggattcccaagggcttctaaaactcatatttatatgtgtgtatatatacggtgtgcacgtgtgtggttctctgccactcaaaatgtagtctgtgggccagtagcattggcctcacctggatcttgtcaggaatgcagcctcaagcctactccaaaatgcagaatctgcctgttaagcactcgacatgatttgtatgtgcaaagagctttaaaagtaatgcctgagagattttattacatttatttaaataatgaaattaaaaccttaagaatgaagaaaagctcatatatcacatactaatgttgacgctgtgtgttcaacttcatcttttgttcccattgtgatagtatacagagaaagatttgctaaatgctacacaatgcattttgtcactcttttttgttatactgtcatgttttttatatataatttcaacttgtattttagattcatggattatatgttcaggtttgttacatggatggcatatctcatgatgctgaggtttagggtatgattgatcccatcactcaggtagtgaacatagtaccccaatagttaagtttctcaacccttgctcccctctctcctggccccctctagtagtctccagtgactattgttgccatgattatgcccatgaatacccagtgtttagctccctctcatgagtgagaacacgctgtatttggttttctattcctgtattaattaacttaggataatggactccagctacatccatgttgctgtaaagaacatgattttttatagctgcatactattccatgctgtgcatataccacattttctttatcctatccactgttgatgagcacctacgtttgtttcatgtctttgctgttgcgagtagtgttgcaatgaacatgtgagtgcatatgtcttttttgtagaatgatttgttttcttttggatatatagcgagtattgggattgctaggttgaaaggtaattctaagttcttcagagaaattgccaagcgacttcttttttaaataaatttattttaatttctgggatacacgtgcaggacatgcagatttgttacataggtaaacatgtgcgatggtggtttgctgcacctatcaacccatcacctaggtattacacccgacatgcattagctatttaacttgatgttctcccaccactagcccccagataggccacagtgtgttttgttctcctccctgtgtccatgtattctcattattcagctcccacttatgagtgagaacatgtggtgtttggttttctgtttctgtgttagtttgctgaggataatggcttccagcttcatctatgtccctgtaaaaggcatgatgtcatttctttttatggttgcagagtattccactgtatatgtatcacattttctttatccagtctaccatagatgggcatttgagtagattttatgtctttgctattgtgaatattgctgcaatgaacatacacctgcatgtatctttataatagaatgatttatattcctttgagtatatacccaacaatgggattgctgggttaaatgatatttctgctcctagttctttgaagaattgtcacactgtcttccacaatggttgaactaatttacactcccaccaacagtgtaaaagccttcctatttctccacagcctctccagcatctgttgtttattgactttttaataatcaccattctgattggcttgagtggtatctcattatggttttgatttgcatttctctaatgatcagtgatgttgagctttgtttcatatgtttttttggctgcataaatatcattttgagatgtctgttcatatcctttgcccactttttgatgggttttttctttttcttgtaaatttaagttccttgtagattctggatattagacctctatcagataggtagattgcaaaaatattctcccattctgtaggttgcctagtcactctgatgatagtttcttttgttgtaaagaagctctttagtttgattagatcccatttgtcaatttcgacttttgttgtaattgcttttggcattgtcctcatgaagtctttgcccttgcctatgccctgatttgtattgcttagattttcttcaagggtttttatggttttgggttttacatttaagtctttaatctatcttagttaatttttgtgtaagctgtaaggaaggggtccagtttcaattttcagcatatggctagccagttttcccagcaccgtttattaaataggaaatcctttccccattgcttgtttttgtcaagtttttcaaagatcagatggttgtagatgtgtggtcttatttctgtgatctccattctgttccattggtctatgtgtctgcttttataccagtatcatgctgttttggttactgtagccttgtagtataatttgaattcaggtagtgtgatgcttccaaatttgttctttttgcttaggattatcttagctatataggctgttttgtgatccatatatattttaatatagttgttttctaattctgtgaagaatgtcaacggtagtttaatgggaatagcattcaatctatacattactttgggcagtatggtcattttcacaatattcattcttcctatccatgagcatggaatgcttttccatttgtttgtgtcttctctgatttccttgagcagtggtttatatttctccttgaagagatccttcacttccctcattagctgtatttctaggtatcttattctctttgtagcaattgtgaatgcaagtccattcataatttggctttctgcttttctattgttggcatatagtaatgcttgtgatttttgcatattgattttgtgtcctgagactgcagaagttgcttatgagttcaagaatcttttgggctgggacaactgggttttcttgctatagaatcatatcacctgcaagcagacagttcaacttcatctttctatttgaatacccattatttctttcttttgtctgcttgccctggctagagcttccaatactatgttgaacaggagtgatgagaaaggacatccttgtcttgtgccagttttcaaagagaatgcctccagcttttgcccattcagtatgatattggctgtgtgtttgttataaatggctgttattattttgtggtacgtttcatcaatacctagtttgaggggttttagcatgaagggatgttgacttttatgaaaggccttttctgcatctattgagataatgtgtttttttttcttcagttttctttatgtgatgaattatgtttattgattttgtatatgttgaaccagtcttgtatcccacagatgaagccagcttgatcgtggtggataagctttttgatgtgctgctggattcagtttgccagtattttgttgaggattttggcatcgatgttcatcagggatattggcctgaagttttctttctttgttgtatctctgccaggttttgctatcagaatgatgctggcctcataaaatgagttagggagaagtccttccttttcaattttttggaatagttttagaagaaatggtaccaactcctctttgtacctctggtagaattcagctgtaaatccatctggtcctgggcttttcttagttggtaagctatttattactgcttcagtttcagaactcattcttggtctattcagggcttcaacttcttcctggttcagccttgggagggtgtgtatgtccaggaatttatccatttcttctagattttctagtttatttacatagagacttttatattaggttggcccaaaagtaattgcggtttttgcataacttttaatggccaaaccatgattagtttacaccagcctagtagtatactctgatggttgtttgcatttctgtggggtcagtggtgatatcccctttgtcatttttattgtgtctatttgattcttttctcttctttattagtctagctagcagtttatctatttaatttttttcaaaaaaccagcttctggatttgttgggtttctttaaagggtttttcatgtctctatcttcagtttcactctaaccttagttatttcttgtctcctgctagctttaggtttgttcttggctctctagttcttttagttgtgatgttagggtgtcgatttgacattattctagctttttgatgtgagcatttagtgctataatttctctcttaacatttctttagctgcatcccagagattttggtatgttgactctttgttatcattagtttcaaagaacttcttgattgctttttaacttcattatgtactcaggagtcattcaggagcaggttgttcaatttccatgtagttttgtggttttgaatgagtttcttaatcctgagttctggtttaaagtctgttttgtcagaaactaggattgcaacccctgatttttttttttttttttcattttcatttgcttggtaaatttttctccatttctttattttgagtttatgtgtgtctttgcacatgaggtgggtgttttgaatacagcacaccggttgatcttcactctttatccagcttgctattctgtgtcttttagttgggggcatttaacccatttactattaaggttcatattgttatgtattaatttaatcctgtcatcatggtgctagctagttattttgcagacttgttgatatagttgcttgatagcatcattagtctttgtacttcagtctgtttttgcagtggcagctaacggcttgtcctttccatatttagtgctgccctcgggaactcttgcaaggcaggcatggtggtgatgaattcctcagcaatttcttgtctgaaaaagatattatttctcctttgcttatgaagcttagtttggctggatataacattatgggttggaaattctattctttaacaatgttgaatattggcctccaatctcttctggctcatagggtttctgctgagaagtctgctgttagtctgatggatttccttttgcaggtggcctggccctctatctggctacgcttaatgtttttttcttcatttcaaccttggagaatctgataattatgtgtcttgggatggattttctcatggagtattttactggggttcgttggttttcctgaatttgaatgttggcctttcttgttacattggggaagttcttcttgttgatatcctgaagcatgtgttctaacttggttccattctccctatctcaggtaccccaatcattcataggtttggtctttttacataatcccatagttctcagatgttttgtttctttcttttcattcttttttctctaatcttgtctgcctgtcttattttaccaagatagtcttcaagctctgaaattctttcatctgcttggtctatgcagttattgatacttgtggttgcatcgtgaagttcttggttgtgtttttcagctctgtcaggtcatttatgtttctctctaaactagttactttggttaacagatcctgtaatgttttatcatggtttttagcttctttgcattgggttaaaacatgttcctttagctcagcaaagtctgttattacccaccttctgaagcctacttttgtcaagtcatccatatcagcctccccccagttatgtgtccttgctggagaggtgttgtgatcatttggaggaaaagaagctctcttgccttttgagttttcagaatttttttgttgattctttctcatttttgtgagtttttctacctttgatctttgaggttgctggcctttggatggggtttctgtggggacattttgttgatgatcttgttacttttctgtagggctgccgcagttcgctgtgggttcactccagatcctattcacctgggtccctcccacatctggaggtgtcaccagtggaaactgcagaacagcaaagatggctgcctgctccttcctctggggtctctgtcccagaggagcactgacttgattccagtgggaatgctcctgtaaaaggtatttggtgacccctgttggaggcgtctcacccagtcaggaggcacaggatccaggccctgcttaacaaattactctggctgccccttggctggggagatgtactccgctggggagaatcccactggtccagactgcctggattccttagagccagcagggggaaagactaagactgctgacatgtggagaacatggctgcccctcccccaggagctcagtcccagggagatcagaattctgtccctaaacccctggctggagttgctgaaattcctgcagggaggccctgcccagtgaggaaggatgggtcagagtctggcccaaagaggcagtctggccacagtctgccacagttgctatgctgctgttgggaattcctcctaggtcctaactatccagtctccccagcactggcaggggtcaaacagcagactggagcctcagtgatggtggctgcccctccctcaggaagctcagttgtcttaggcagcagacagccacagtgattatggccacccctgcccctggaaacttggtagtcttaggcagtctccagccaagtggctgctgggagtctgcacagctccctgcttggtacccaaggccctggtggcatgggctcacaagggataaagggccaagatggctgactagaaacagctgcagttggaggctcccaccagaaggaaaatggtaagtgaatcctgcaccagcaactgaagcatccaggttctctcactgggactgactaggtggtccccacaacccatggagaacaaggaaaagcacagtggtgtgaccgcctacctgggagccacatggggaaagaggagctcccatccccagccaaggaggcggtgagtgacggagctacccagcctgggaaaccatgctttttacatggatctgtacaacccacagatcaaactgctttctatagtggttaaactaatttacattcccactaacagcatataagcaatcccttttcaccacagcctctccagcatttgtggttttttgatttattaagaaaatcaattctggctggtataagatgatacctcattgtggttttgatttgcatttctctgatgactggtgatatggagcatttttttcacatgcttattggacatgtgtatttttttgagaaatatatttttgcccactttttaatggagttatttgtcttttgctttttgaattatgttccttacagattctaaatattagatcgttgtcagtttcatagttcatgagtatttcctccaattctataggttatctgtttactctgttgagagtttcttttgctgtgcagaagctgtttatttcactaggtgttacttgtcaatttttctttttgttgaaattgcttttgaggacttagccataaattcttccccaagcctaatatccagaatggtgtatcttaaattttcttttaggacttttatagtttgaggtcatctatttaaatctttaacctattttgagttaacttttattcatggttaaatgtaacggtccacttttattcttctgtgtatggctatccagctatcctagcaccattcattgaatagagagtcattttcccattgcttacttttgtcaactttgttgaagatcagattgctgtaggtgtgccgctttatttctgggttctctattctgttccatttgtctatgtgtctgtttttgtaccagtaccatgctgttttggttattatagccttatagcataattcagagtaaggtaacctgatggcttcagctttgttttcttttttttattgctgttgttttattttgttttgttttgtttttgcttaggattccctgggctactcagactctttttcatttcataagaattttagaatagtttttctaattctgtgaaaaatggcattggtagtttgatagaaatggcttggaatctatacattgctttgggcagtatggtcatttcaacaatattaattctttgaatttgtgagcatgaggatgtttttccattagcttgtgtcaccaatgattcagcagtgttttgtagttatccttgtaaagatctttcacctcttcagttagatgtgttcttaggtatttcattcattttgtggctattgtaaatgggattgtgttcttgatttctactctgtttgaactttattggagtatagaagtcttactgatttttgtgcattgattttgtgttctgagacttgactgaagtgtgtttatcagttccagagcctatggaggtgtctttagggttttctaggcatagaattatatcatctgtgaagatagtttgacatttttaatgtatttagatgtcttttattttttctattgcttgaatgctctggctatgacttccagtactatatagaagaagagtggtgaaagtggcatccttgttttgttccagttctcaaaggaaatgcttctagcttttacacattcagtaagatgttggacatagataacacttgttattttgaggtatttctttcacacctagtttgttggaggttttttttttaatcatgaaagagtattgcgttttattgaaagctttgtcaaggtcttttgagaggatcatagaaattctatgtttggttaataacctttattgacttgcagatgttaaaccaaccttgcatcccaggaatgaaacctacttgaccatgttgaattaattctttgatatactgctagatttggtttcctagtattttgttgataatttttgcatctacactcatcagggatattggcctgtagtttccttttctcattgtgtctttgctaggtttttgtatcatggcaatactggctttgtagaatgagttagggaagagtccctcctggattgtttttttttttttttttttttattttcagtagaatttgtaccagctcttctttgtacatgtgatagaatttggctgtgaatccatttggtccagggcttttttagttagtagataatttttttattactgattcaatttcagaacttatattggtctgttcagggtttcaattccttcctgattcaatgttggaagagtttgtgtttccaggaatgtatccactttctctagattttctagttgtgtgcatagaggtattcataatagtctctgaagatattttgtatttcagtgggattgtttgtaatgtaacctttgtcatttctgattgtgcttatttggatcttctctcttttcttctttgtgaatctagctagtagtctgtcaacctcgttcatccttttgaagaaccaacttttgtttcactgatcctttgtgtggattttttggtctcaatttcattcagttcagctctgactttgtttcttttcttctactagctttacagtttgttcttgttttcctagttcctctacatgtgatgtataataattaatttgagatctttctttttgaggtaggcatttagcactataaactttccccctaacaccacttttattgtatttcagatatttaagtacttttgtctctgtttttattgatttcaaagatccttcttattttggtcttaatttcattgtttacccagaagtcattcaggaacaaatagtttaattttcatgtaattgccatcattctttttaagccatcagtggggacatatcataaaaagcatgacatactgcctccaattagctgatgaaagatgacatctgtgccaatgggcctggactgcagatgacagctgtgcactctggccttattccttcattttcctacatgagcagagcacaatcttgtaaactcagagtgtggacatgcttctaactagtaatatttccctatctacctaccatcattagttaccatttttttctgagtataaactgcttaatttcaatgctttcaatttctgaaaatcaggcaaaaaagtaaaatctgaaaaatatgcatgtctccaaaccaaagtggtttttgttgttgttggtggtggtggtggtggtggtggttcgttggtccgttggttggtttttttgtgcgtgttcaattttaaccaagtcagcatgcttgattatggtctttcaaggtatgcctctcaaagaacaataaaagctgcatcactctaaaaatggaaaacagtttgtaactctgaggtgccataaattccccaaaaataggttaccatttaagttggcatcaaatttacctgaggcaacagcattttcattaaatagctatgaagagatttaaaaaaagaacaaaactagcactaccaccaaaaaatggtaattatcaaacaggaatccgttgccaaactctgagagaaagctaaccacagtgacatttatgtacgtgtaacaggactggtaggtggtgatatgatttggctgtgtccacacccaaatcccatcttgaattgtagttcccataatcccaatgtgctgtggaggggacccagtgggagataattgaatcatgggagtagttacccccatgctgctgttctcgtgataatgaatgagttctcatgagatctgatggttttataaggggcttcctcctttgctcagctcttattctctctcttgctgccatgtgaagaaaaatatgtttgctcccccttctgccatgattttaagttttctaaggcctctccagccatgcggaactgagagtcaattaaacctctttcctttataaattatccagtggtgggcatgtctattagcagtgtgagaagggagtaatacacctgggtactagaccgtcttttccttgcatttaagttctgggacctgggttcagttgcagaaaagcagaatttgaggcaattgtatagccctctccctttctatgtgtgtttagagatggtggctcacaagagacaacagagcagagaatgccagcatattgtctgtgtgctggggtggagtctgtcagaagtgctggtgccctgtattaataacaggaagctttttagacacagtgtgctggatataatagcttttttttctttaagaaattttttcattctgataatcagatttaagcactgtgaggagaggaagatttcatatttaaggataatcatgtttttccattcccctatttgtaagggattcctgatctcttacttgtccctttcctcttcctcatggaagaaaggtcgataatatagttgatgtgtggaaatcaggagcctctggttctttcggttggagctcatctaacaagaccttgagtgtagggatgcaatcttatcctccttcctcttcactcagaaagctagaagctgaaagaagacaagctggcgtgctctatcgattcaagtttcaacttgagaatggagcataacaaactcattttagatttcacgaaaagctacatcatccagccaggatgttttcaataaaaaaaaagttgggtttggttctccacctgctgactcttgtctgatttatcagttggttcagaacttgaacaggaaggagaggtggtattctttgtgtttcagagtacaagacacagtaaaagaatgaacgctaaaaatgcatgcagtgggttaaagggtatgtacgttaatgaatctcaaactgtatatttgaaaaagaaccctcaccaaagatctatcactgagagaaagaatatttctctaaacttcagagagaatatcttatttatatattttttaaatgaggttatacagttacctttatgcatatgcatattaaagaatagtaatttgttagatccaaacattttaaatataccacaacatttataatactgtatagtgatattttttgttattttaaaatatacaagatgcctgaaaaatggaaatggtctgggtctctcctgacctctaaaagctcttaatggggctattctgaagtggctgaagagctaggtcaaagaccagcccaggctcacttctgagaggtctctgttcattcaaatgtaaatagagaggaaaactgagtgttgctaggaaaaggaatctgcatgaactctaaaaagggaaaatgacctggagatatataaaccctaggtttccagaaattatttgtgcacgaaccaccataaattcacatgaaagtgtttattgtcctcaataaaatgcaaaaaggcattctctgaaacagaagcaggaagtcataagatcaaagggttgttgagaagttcatttatattagaagggttgggcaagattaagaatgattggaggaaattaaaagtggagagtcataactgtgatacacattggagacaatgaggaacaaaatcccttctataggtaaaatacatctttgttgcagaggacagatgtaaaacgttttctaagaatttagacaaaggaaaggctaacatgaaataaagacatagcatgaagacgaaggagatctgtgatcagggttccaaatgaagggaccagaacagaactaacaaaaagcacagaagactatttcatctacctataatgacagcaacaaccataaccttcctgagtttagcaaaatataaaaaggaaaacttgagagactgtactgcgtgctcaacaaaatcagaaaagagagctacaagaatgtacacgtggtgataatttttaaattctatgagagaggtaaaaatatccttcaagaatatttgaaggaaatgaggaaaagaaaaggttacttaataaagcaaaacagactggcttcagaattattactacaacacttaaagtcacacaagaagaagccagtaaggactcaggtaatacagtgttttagtaaaaagaaaaatgataggtgaatatacaactcacttaatgaataagaaagcaaaattaagaacttgagatcagaaggattatggcataaaaatatgataggcaaagactgaaatcagtcaagcatagcattgaggccacataattttataaacctagacacaagagtggaggcatgtattaaaaatcacttttgaatgagaaagtttaggatggcgaaaactaaatgataacctatgctaaagaaggtatgcaacagaagaaaataaactccctgaataaaagagttagtctaaatgtaggatatcacagtattattactaatgatgaaataaaggtggaaatgcagttgtgagtacttataagtgtaagtaaatgtttatgatgctattaatagaatttaataagtcttgtaaataacataaaaacctcagacatgaaattgaaggaatggcaatagtaagaaaatgtaaaacgagatgacaaagtcagactaaatgtacacattataataaaagtaataaatttattataaaatgtatacactacaggatgtttataagaaacacaaaatgattccaaaaggttctaggtaaaatgataggcaaagaattgccagtttattgtacaagtaaagaaagcagaagtttcagtattattgtggatgaagtagaattcaagcagaaacacaataaatggtgaacaaaatcatgtgcttattggcaatggataatactcttaatgcgaatgcgcaaatataaaatattaaacacaaatattaactttatttttgacaaaggagaaattagatatggctcccaaactcaaaaatagctgggggcagggagtgggcaaggaactgttaaaacaaaagattgtaatgcaaaatgcctaatgtacctccgcattaattcaacaaaaacttgagattctttctctgtgacataactcaagctttgagaatgcagtggcgaataagcagatgtgcttcccaacttcaccatgtttgcagtctattttgaataaaaggaataatacaaagaagagaacaatgaacagccatggaaacaaagtgaaggaaggttttggtgatgaaaatctgcagatgtttcactcatttcacatcaggttggtagaagctgctttgtcaagtgtatcctgctatgttaggtacatgaagaaaatatacaaaaaggcacaccaaattagcatcaactactgcaaaaataaataaataaaaattctcacaagaaaattaactttttctttttttaaagaacatggtccaagaattgcttctttccagaccatgggcccacacatttttacaagctttgctgatacatctcccccagccaggttaacagaaagagcaaaattgttcccagagaaggtattaaaagcatggccatgatcctgtgcatcatttgctgccaacagacacaaaagggatggcttgtgtattctccaggctcatcaactgcagacctaccagtggctcatttggtcccttcctttgtgcctggcaccctatccccacttattgaaaatatttaatagaacagaaccttcttttcttgcatttagccgaaataaaattagttcacagtaacagattgttaccttgactaactggacatactaacagactgagatgtgtggcaatacatttcctcttatgacatttttgtctggcagcataagatgactacaaatggcatctttactgacacacagaccagttctatgtttcgcaagtgttgattttactcctgattttctctgcagtcttctagaggttgagcatgactctttcgttcatttccctttggattttccatatttaatcattttcaagtaataatttagcttgataacatgaacttggatttaggagaaatccctttaagacttcaccaccagaaacaatatggggtgtgtacctcatgcattcagtagcaatgtattgtatatctgttttgtgatatcactgatggtcaagagacattgaattgtgtattgctctcttcttcccagctgtgaaacgttctagtttctgagtctggattttattttattttatttaaaaaacgaattttgaaacgaggtctctttgttccattacaataattttcagtactctcttcatctcttattaagtcattctgtgccttctctcagagcacattgtgactgaagcattaattagccttcagagatcctcagacatgcttctttcagcaaagatctgacatttggggactgtcagtcacttggagttataccgaataaaaaattcatattaaacatttcaacaaggagttcatatacaatggcagagggagatggaagattgatagagtagaagggagtctgtttaaactttatatattagacaacatggggtaaatgacgtttggaattaatgaagcatataatcataattacatggctggttcatcatcctaccttccaaactgtgcctgaaatcagctaatggcgtaatacatgtacagtttcttgtccagagcctatctatcatggcatgagtattcaatagcttagccaacattgtcaataagaagctgtttctctagcacaaaaatgtattaggcgctaaccaatgagatagctgcagcaggcttaacaaaaaagcttacattttctgttcttgccttttctctttgaccagatttcacagatttgagaaggtgggatgacatggaggaaagctgatgttatgaaagcaaggagttcttccacaggctcccccttgctcaaattagcgttgaaaaaatggaaatgaaagatggaaactgatgtttattaaatggctactatataccacgggtgtcgcctataccaatagatgcagtatttcatatagaatagatgatcaataaatgttgaaatcaataaatagatgtatgatttatatgtatatgtatgtatatacatgtatattatacgtcatacatctgtattatgtatgtatatacatgtatattatacgtcatacatctgtattatgtatgtatatacatgtatattatacgtcatacatctgtattatgtatgtatatacatgtatattatacgtcatacatctgtattatgtatgtatatacatgtatattatacgtcatacatctgtattatgtaagtatatacatgtatattatacgtcatacatctgtattatgtatgtatatacatgtatattatacgtcatacatctgtattatgtatgtatatacatgtatattatacgtcatacatctgtattatgtatgtatatacatgtatattatacgtcatacatctgtattatgtatgtatatacatgtatattatacgtcatacatctgtattatgcatgtatatacatgtatattatacgtcatacatctgtattcatgtatatacatgtatattatacgtcatacatctgtattatgtatgtatatacatgtatattatacgtcatacatctgtatgatgcatgtatatacatgtatattatacgtcatacatctgtatgatgcatgtatatacatgtatattatacgtcatacatctgtatgatgcatgtatatacatgtatattatacgtcatacatctgtattatgcatgtatatacatgtatattatacgtcatacatctgtattatgcatgtatatacatgtatattatacgtcatacatctgtattatgcatgtatatacatgtatattatacgtcatacatctgtattatgtatgtatatacatgtatattatacgtcatacatctgtattatgtattacacatgtatattatacgttatacatgtgtattatgtattacacatgtatattatacattacacatgtgtattacacattatatatgcatatgtacattatacattatatgtacagtgtgttaaatatatgtgttacatgtataatatacatacattatataatacatatatgtatgtgttacatatgcatatgtattatacattatatgtaacacatacatacgtgtattatatatcatacatgtaacacatgcatgtattacatatacatatgtgcatatatatacataaatacatgtgtctggaagtataaagtggtggtaaagaccatggagttttgtttcatggacttgggcccacgctcaggcagtacatcattaagcaaatggaactataatgactgctgtcacaacttttcttttccaggttattactgttaatatatccctcaccatcccataacttttactttaataattctcagggaagatcttgtcatctccctgaaaaagtcatgtctgagcatgagcccccagattcagattgagatccttatggaatctctgtacatttcaatatttttcctaaatcccttatgaggttagtggtttattttcccagcctatggagggaagctctggcaagaatactgcataggaacagccaggatgacctatgggatgccatccagggccctccttccatgatgggaagtccagccacgcgctgctaacagtgaaatgcaatgtggcccattctctttcactataaggatagacagctgttcactgaccatatccatttacaccactcatttactgtgacatttgcggtttgaatatctgtttgccacatcctagctctgttaacactttgtatatgatctgacataacagagagcataaactaaccttcctcccagctctgtatttgatccaaaaagcaagtcctggtatttcctttttcccatgattaaaacaacaacaaaaaaagaatatcgtgtattgctacttagagtactcacaggaaacaatggaatgctcaatatgtttaaagaaccaataggcgttcatgatagtctccgggattaatgacagtggatgacttgatatgaatgggggaaagaaaaggaagaaggtggccgggagcagtggctcacgcatgtaatcccaggactttgggaggctgaggtgggtggatcatgaagtcaggagatcaagaccatcctggctaacacagtgaagccccgtctgtactaaaaatacaaaaaattagccgggcgtggtggcgggtgcttgtagtcccagctactcggaaggctgaggcaggagaatctcttgaacccgggaggcggaggttgcagtaagccaagatcgcaccactgcactccagcctgggcgacagagcgagactcagtctcaaaaagagagagaaaggaaagaaggttcttggaacctgggaagagctagaatggtggaagaggcagtgcaaggcaagaagtgtagccatatacaaatgcagctactgctcaaaccaaacaggcagggagagaacagtggggaataaacaccctgacctttcttcttttgttccttgaattttgtttgacgtcacctattggttggtcactactgagtatcagaggacaggctggctagaccgatgcagtagaaggtagctatgtggacagagagtggcagagaaggcatagtggagctgggataagggcaagcataggagaatcagtaccattttgtcttttccagccctgggtctccctccagctgccgccctctctcccttcagctttacaagcttcagaaaagcttgctgctatagggctcgcctcctgttgaacattgacactgggaaatccagcatttatttccgcctctgctctgaaccttctttgaccaagtcacactggcatccttatggctaaatcctacatccgttctttagttctcttgtggcaaaacctcctcccacgtgggccgtcgttctcctctgctcccttctttactgttttggcagtcattgtaaagatcatgttaatgacaaaacaaaacaaaccaacaacagaatccaagagcaaaatgattgtttacaataccatcctgtatttaatttcagatttattattactttctgaaacagggtcttgctgtgttgcccaagctggagtgcagtggcacaatctcagctggctacaacctctgcctcccaggttcaagcaattctcatgcctcagtctagtgagtagtggggactataggcacatgccaccatgctcagctattttttcttttttcttgttgtatttttagtagatacggggtttcaacatgttggccaggctggtctcgaactcctgaccacaagtgatctgcctgcctcggcctcccaaagtatgggactacaggcatgaggcaccacgtctagcctaatttcagatttgtatttgttcattatttctagtctgtatggcatttcacttagcacacagagcatattgcatcattttgccagtttctttcttgtattcccctccttccctttcctacctcatccgacttaaaccatgtgaagaacctcacacgtgtgttcttcatatctttctccatgacccatacaagcatatgcaaaactatgtatacacatgtaaggtgactttaatgtgctggttttttgttttaatggcgcacacacacataaaataacaccatatatgtttctctacaactccactctcaatataatgtaaattatcctaggatgatttgcctggaatttattttgttttataatactttacctcgtggctttccagacgagcatcaggcttggcacagcttatccatctggctaggtaggtgtctgttctttattcaattcaagatgaactctcctttagtcaaaaacaagaaatctctaaaggagccaccaagctccttcttgaaatattctgtgcccatagtttctgatatccctctgtcctggttttcttcctcaaattctctccccacctgtgtgtgtgaaatcctccttctctgtttcctttcttcatgcttacctttgactcaactttttctgtgataacaatgcttaataaacaaccctataattttattggcttaaaatcacaaacattaatctgaaaaggctgattttacatttctagtgaatttctgataagtaatttcccctggagtaatgtcttacgtacgtttttgtgtgccagcttatttcctacaaatccttttttcatattttaattttcctgaagcctttctccaagcctctctatgccaaaaaataaataataaagtaaatcataaagtttttcttggaaatcagtacaaggtgctgtgatgaataacaaactggaattaactctgtctttcttaggccatcatacgggactcaggtctgggtaagcctcctctcggtcttgttaatacaaggccaaatagttggttgtatcttcattatttatttcaagtcttcaaggaataaaaacactggtttttctaaccttgactgttattatatgaaaatcgatctatatcattatatcttagtagtgtctacaaaagggaccaaatatattagtgtctaaaaacaatacatagaatacggaagtcaatatatatcctcccagtcagagatttaaatttagaaatttctaattattgtcctcaccacagaaattcaagaagtgagtgtgccactctccttcatggaaaattagggttggccaagttccagggggtagaaatagggttttgtagggctttagctatacggtggaaaatacgtaacttagaaaatatgaagagataaggtggtgaaaaaatgcaagaaaacataaaggagaaccaagatcctgagtccaaggaaagcacataaaatcccacagctgggagccagaataggggattcagacataagttacaaagctgagaattgcgcactctggacaagtgaaaatcggggaggtgaatgaaggtcctattttctagaaatgttttcaaatatcagggcagctcagagtgataaaagcccaagtcatttccatcttttgactagttcagctttttaaacatcataataaatgctcaatcagaagtataaaaattgtgatatagtttaatgctcacttttaacaaattaatccttttaacaaaagctttgtaatgcaatgcaactgtgccatccacaaagcaatgatcaaactttgaattaaaaaaacacacatttgtagtacctgttttggttaagtttgggaaaccaagtaagttgaatgctgtgttctttcaattttgtcaatatttatctgtaattgagtatataatctaacatttacattagcaatgtaaactttacattaacaatataaggtctttaatgaatgtgaggcttggctcaagtctcttggcctcgtcatatctgtccctcccaggataaatcttttaaatctcagctggccactcatctttattattgtgatgagtttggctgacctcagggttagcatcaacactatatgaatttatatagccatgaaaaaactgatttaacgtttctggggcatctctgatgggtaaattaccttagagacatgttttatttacgtttttgtttgttgacttctttcactctcttgcatgcaaatctttgtgtcttaatttgcctggacttgtaattctcatgaccacagcaagactaaaagggaatctttggaaagtgcttctttaatttgatgaatacagacgggtaatctgaataaattctgttaaagtatattaattatccattgtggcagtccacactaatcaatttcaccagaggttgcttgtgttctagatcgttttctgcatggaagtcatagtcgaaatcattattaggacccatgtaacagagaacattagggacatatcaaagttagcaaaataaataatgtaatatttatagaacctcttcacttacagttgtctttatattaatagcctactttttttaaagaataacataagtaactgcacataggaaaaagctcgattatagtaaactaaaggaaaaaaaaagatcctccattacagaatctagcacttggaaactccataatatatagcctagctctttacattttttttttgaaaagtgtatgtatttaaagtgttcccttaatatctttgaagatagatttttgaagtcaactttttaattttaaaatagctacatgtgcttcaaatctggtggttcaagataatttaatctccctaaggatataactcttacagctgtaaatgacaaaaaaaaaaaaaaaatccattgatttaatcaaataaggaatgtactgaatcatacaactggaatgcctggggtgtggactgccacaagtcttgcttcagctagggttagattcaagggcttaaatcagaaaaatattaattttttctatctcagatctattttcatcaaggttaacctcttctccaggtagcattctctttctctatatgtaacataaaggtcatttattactctaaaattacattctaccagtttatcaaccaaggaaatagtgcctctttcctaatctttccagcaaacctctcaggtaggatgcccattatctcagctctagtcacaggctcatccaggaactgatcctgtggctgagaaatgaggtggccttaatgcctctactggaaacatgtagaaggagaatggaacaaaggtgtcttccaaggagaacacctagaagcaagagagatgaattttgggtgggtaacgacaacttgttcattagagagcaggattatgcctgcttttcctctggcccatactgcatgcctcactccttccctgcagcatctacctgttaaaacgcacatggtaaaaaggagtacatgttgaataaatcaaggcatgagtttcgtttcagagtagaatgggaaattgattggctctgaaatcagagaaaactgttttctaattgtgggtctacaacatactgagagatcttggggaaaattaatgtgtgtgctttcatcttctcttatgtaagtcagggataatacagggatttttaagagaaaaagatgtgaatatatgtaaattacatagtcgaggcctttttgtttgaaaaaattaagtctagtctccattaaaatacaattccattctactagaattatcatttaaatttaacttatttgaaatttaatattttattaaaacctaattgattttttcataggattaaataatgtaatttagtatctattgatttgggttcagacatattaaataaattttaatgcaatgtctttgtgtttttcataaaacaaaattgaaacacattatttaaggacattctacacttgacctattttcttataaaaatatgtgcctgcccctttaatgtttggaacgggtagataattctgtcactttgtgtaagtgtataaaagagggagaaaaataatgatgttttatgtcctgaaacaaataatattttactctttccatttctgtttaccccagcctccggaggacttagaggcaatattgtggaagagttatcttttgtatatgtaatagaccaaagaataaatattaaatccgctgcttcacttctcctatctgtttccccaatgtcccaagtggggtcaactctgatatcttttgctattacaacaatcccagaaagataaaagggactggcatgctaacctaaggaaactacctattgacaatatttttgttgtgatttaagaaagaataagcctatcaacaaatacacttcttcagtggtggatgacataaaatttaatcatgcatagtccttcttttggatacactggcaaaaaataagatgccaaagtggcattcagcatatggaacactgaaaaaaacattctacaacagacttttctacgttgtcccatcaaaaatagttcaggtaggtgttaaagaaaaactattgtagacatgtctagacaacaccaaatcctgtccctgtgcacattttggaagaactagggcctgagtggggaaaaaagccccaaggtattttggaaaaggctaatgtgtttgcttcctggaagaagcaacacctgataagtaaaatatttaaataggaagtgattcaccctattgctgttagtccattgggctgtcatcatacattatagacatgactctagacagtgtcattagagaaagttcactgacagtgtaatcagttcaatccctggtgatcttcttcctaaacattgtctagattcatctatccccatacttggtaaacattttcgctaacaagcctcttaataaaaaagaacaaactcccattccccaagtatgtggagattcgcccaaagtaatgacacattcttcaaggttttttattttaaaaagcaatttgcatctcagcttctatataattgaacaagtgtgcttgcttcggtgaactgtatagtgtaaaaatactcatttgagtttattcccattgaactgaccagatctttaagtacaaatgtgtgcagcagctagatttgtgtgactccagctttaatatttatttcacaacaccgttctacaagcaccaagaggaatggaactgtgactcatttcttcattgctgtacccccagggtctagtcagtacctggtaaagagtaaatacttgataaatgtttgttgactgaatgaaagaaataagtaattaacatgccgtgtgtatcctcagccttcccattttctcagtgcacacccccaagaggatgtgtacttccatttgaaaagcactgctcgataggatgcaaattgaagccaagaatcagaattcacagagacaaattaatgaaacaattttctcttcccttctgtgattttattagctgaattatgggtgcggcttatttcatggatcaaatgaccgagtcttctaagtctgtgggctcggtactcagcaattatccagttaatatgattaatgtcgacagtaaaaatgagcatcagcttggtcacgggggtctcatgtttctgaggcttggaaaccacatcgaatctgcggaagaaatgttcttttgaaggaattaagctccggaggataccttgttcctatccactgcctccatatgtcttctgccctctcattcttcctcctccttctcggataactcaatattttttcagatcttcatttctggccatgctgcatgtatgtatgttgtcagtctgaattacttctaatttctcaagcatcagaaagacaatcctgttaaaacatgatggcaaagccctgactagacagttgggtatgatggcctatggtcatgtgggagaggaaaataatcgctgattaaaaatattattttacctcagaaatgctcactttttaagggaaaagttgtcttaaatccaataccaaaaataaaaaaatcagtgaagggcatttgggctaccttttgttgagcacatctcagatgctacgtacttaaaaacatgaacctattgaaccgattcacctctctgcaccaacctgagtaggaaggtcctgctgtcctctgaagacagggcagggagactcgaaacagtgaagcctcttgctcaatcataggtgaaccttggcagaacaagggtccagtgccgatccgacctaaggaaactacctttgacaatattttctgttctggtttaagagagaataagtttattagcaaatatacttcttcaatagttgatgacttaaatttcattaggcctagcccttgttctcatacactggcaaaaaagtaagatcccagagtgccattcagcttatggaatgctgaaaaaagcatttctacaacattacttttgtatgttcccctatctaaaatagttcaggtaggtgttaagtaaataaatactattgtagtcatgtctggacaacaccaaatcctattcctatgcaggttggatcatcaaagcaaggatgtaaaggattaaacagaagttgtggatacagagtggaaatttggtcagagacgcagatagagaattaatcacaattaataattttaacttaaaagctctgtctggaaaatctgaattcttaaccactgtgttacatttattttggctctgtagcaggtcaaagacagaactatcaactgagcaacatctaatgtaagactttttaagtctggcgcacgcacgtacacacgcagaaagaataagcatatttcagtatatgtggccgggtaaaaatgacaatgaattattcttgcaaccaaattcaatagtctgaataggacaaagtgaaatattgtcactttatacctcttgattatgttttaatatctcctaataccacagctaatcttcggggtactagaatagcttgttgaaatcatgtaatttgaaggcttcacctagaaatcttccatttgaaatttggccatcaacatattactctatcacctggaatgaaactttaccaatgggctgagactcacatttattttaaatttctctttacaatgcaaaatatgctcatgacagacagcacatattgccataaatcccatttagatcccattttttggagtgatgactatataagagttctagtttatacaacctcaagtgggtttttttttgtttcgagacagaattttgctcttgttgcccaggctggagtgcaatggcacaatctcggctcaccacaacctccacctcccaggttcaagcaattctcctgcctcagcctcccgagtagctgtgggattacaggcatgcgccaccatgcccctctaattttgtatttttagtagaaatggggtttctccatgttggtcaggttggtctcaaactctcgacctcaggtgatccacccacctcagcctcccaaagtgctgggattacaggcatgagccactgcacccagcctgtcaggtgggtttttatcatctgcatttgcagaaagacaagggattttcccaaggccacacaaatcagatatggtagagcttggatattgggcacttttctttagcttttcccattgtgaactttcatattctgtaaggaaatttagaaatgagtaccctaacagagccctaagaaaatgggacactgagtagtgagttttcataagacttatcaatagaggacaggaacaaaaacgtgctcatggcaggggtacatgttccagcaatagtcacagtgacaacatgaagattcccaagggctaaagttaaagactaatcctcatcagttctcagatttgccaaagaaagcccaactataaggattggtgacagttaatatgattaatgaagacagcacactacatttaataaagtgttttgtcagcaaagatatcttccattttgagcaatttaatttcaagaagttcatattctattcaggaggggatgcctaaaatacctcatctgaaaaaataaagaattgcataaaatatttaaatagaaaatgtatagtatgtgcacatgtggtatgaagagctgtataactgttacttgaagaaggcattcagtgtgagtcttccaggttctcggtgtgttgaacaaagaattgaacaaaatgcacaaagtaacaaaagaatgaaacagtgaatgtagggatttactgaagtgagaaagcactccacagggtaggagtaggcctgactcagtgactcaagggcctagttacaaaattttctggggttccgtaccttttagaagtctcttatttgttaccacctatgtggatgaaggatttgacccatagccaacccgaggccagaatggattggtgccttatgcaaatgaaggaatggcctacgcttgcccaggccaatcaggggcactttgcatttcccatatgtgacccagtggaagggaggaggttgtaaggagagtagccttttgatcctgtgttatttgggtctgggaggtgggttccccttttgattcagttttaggaagtcagtgcaaattggccttcggtaggtaccctgtctccagaccctattctcctgcctcaactgcaaggtggggaagggtgaattgtggtgtcatctgcattgcagtgatagcttgaaatctgggatggttgaaagccacgaaggaagctggagagatggcagcacttaaaatacctcaagtacaggcattggggaagccctacatttagggcgaagaggaggatttccaggacacagactagaagtggctaggcaggccagggtgaagcacgaggattgacttgggtcgtcaaagcaaggatgaaaaggtttcggtagaagttgtggatacattgagactggaaatttggccagacatgcagatagaaaactaatcacaagaataattttaacttaaaacaaaaatgaaatatctttcaactaatatgtaaacagaaaaactccatttctgcaggtctttcttttgaatttggaaatgctctgatttcatgtgccaattatgtttcctagatcatgcaaccttgccacagccatgtatagaatatagagcaattgtgttttccccaaacatgatgaagaagcatttttacccatgcagtggactcctggtgaacttcattattttccctttcttttttcattgctaccttcgcctgccttttcacaagcacagacttgaacatttgctactctctttatctctccaaaggccctgttttatttctcagtagctgccccgtttctaaggaggtgaagttccctttcaaagctgaacttcagactgcaccttgaccattattactgcaactctcagctccaggacagcgtttaaggcagactaaccagagacctgcttccccagcctgcaattgaggagaaaaaagcagactatagcaggaggaatttgcggtggattgtatggtattgctcacatgaagcttcttggtatttttctttatatgagatcaatttctacacttttcttcaactctttccttcctggacttttatgaggtcaaactacagataaaggcaaactcatagaggcaacaagaaaggagatggactgttggtctttattttcttcctcctcttgataatcttaccccttctcttcattcctcctctaaaatttaccccaaaattgagctttatggatggtagagagttagtgatttattattctctagcaagagtatttttcctttcagatgtgtgtctttagaagtcctattttaatgtgcacaggtaccccacagatagattgaaaaagaggatatctgcaaaagcccagttagccaatttcgtgagtgtgatcaaaggagttcaaaggcaaattcaggtctcaaggaaagagatacgggaaatgaaacagaccaaagcctgttctactcaacctagtggaggacagaggctttgaggataagggaagaggaggaagaaactaagaaataaaagaggtcaactcatgattgagctagaaaaactacaactggaaaagaggttataggtggcaatttagggatttctgagtaagactgggacttgaaaataagtatctagatctcccctcctgtctcttcactgaagtttctaaaggcacattaaggtgtggggaaaacacttttagagctgaggacttcagaaggaggtcatcagcaggtgaaagtttgagtttttctcatgaaaaatagaactagattgaaagaaggaagacacagcagggaaactccacctccactactccaccagctctaagaaacatctttaggatgaaagcctagaggaccatgtcaaaaccttattaacacaacctaaaccagaagagaaagtactggagctaaaattgggccatttcctgtgaaccctctgtgaaattatgaccaaagaaagtagaagggaacatcagccttgggataaatgtgttgcctgcagataaacagtgtagcagatcccatctggggctctaattcttaacctctctcgacacccgcaccttttgctaagtgacatcagagctgtcttcccttgcctgccccacgggcagagtaaaccccactctacctcctgacttaacagtgtggccatgtgacttgccttggccaacagaacaaggcagtgatgctgatgtgccagtgcaggggtgacaccttaagggaccttgcataatgccattcacatgggacagaactaacccagaacaacctgctgatcttggcagagcagccaacccccaagctcaaaagctaaatacttgctttttgttgtatgctgttcgagatttttgtggttgcttttttcacagcaataagttatcaatataatacacaagggcttgtccctaatctaccaaagatcatagtggcctagacctgctatgtgaccatgaaaataaatgacaaaatgttttgaaaacaaggagttcctgcaaatgaatgcaccaaaaccatagaaatcagatccaaagatggataaaggaaaccagaatgaatgttgttcttcttgccctggatgggcaggttgacttagtaatgtaaatcagtgttgaagctattcacatattttcttttctggattcacttatttgacattaatccaacaaatatattttaatgcatccactatgtattaggcaataaagtgctttggaaaaagtgcggaggagcaggcagacacggttctggccttcaggaagtttgatgtccatcaattcaggaagcatgcaaggcgtgttttgattttttgccggtcactataaaggagaagataatggagtaacttgcatacagttatggagggcaaataatatcccataagaattgcttacggaaacaagtgtttttgaagacaataaagagttgtttgtcaaacaaaaattagaagtgtataacattcatattgtcttccttagccctccccacaaaaaactaatatgtatactgcaaccaaccaataataagaaattcataaaacaattaaagattaacattaaaactaggcctgggcatggtgactcatgcttgtaatcccagcattttgggatgccaaggtgagaggatcatttgaggtcaggagttcaagaccggcctggccaacatggtgaaaccccgtcttctaaaaaaaacaaaaatgagctgggtgtggtggtgcatgcctgtaatcacagctaatcagaaggctgaggcatgagaatcacttaaacgtgggaggcggaggttgcagtgagaccagatcctgccgctgctctccatcctaggtgacaaagcaagactctatctcaaaaaaacaaaaaaaaaaaaaacaaaaaaaacaaaagccatttaagcatggaggacagcctaaataattactaaatacataaatgtttttaaaattttaaatttacttttaaaaataccaaaaacaatacataagaaaacatccagaatataaaattttaaaatacaaaatctaatattagtaaccctgtgccaggtgttggaaaactatggcccacagaacaaacttgctcactgcctatttttataaatctttattgggacatagtcatgctcatccatttcatattgcccattgctgcttttacattataaccactgaattgaatagttataacagagaccttatggcctacacaaccaaaaatatttgaattgctaccaaaataactgctgaccgtcactctgtagtgataaatttggaattcttaattaaatgagtaatattttcaaaaagtatacatttcaaaatttatccaagaaaaaatagtgaaaaaaaaacaaaaggaaagcaatggatggcaaaatagttgttccatgaatacatctctaaagagctttgatgctaatttagtcaaattttcaatactgtacaatcttctctagagcagagcaaaagaataaaagcacttctagctaatattatgtggcataactttgatatcaaaacataaagctttatataaaaagatgccaaatatcaatctcatgtactaatattgacataaaaataaaagattaattcagtccactactatataagaaatatgaattaaagtttatgtcaagaatgttaaaaagcctccatgttatctcttgaactaattgattggttgctttcagttcctaaaacacattgagatgtggggaaaccacttttatatggaatcacaaagatgctatcatcaggtgaaaaactgtgaggagtttctgcccgaaaaattatagaaagaggctgggtgtagtggctcatgcctgcaatcccaaagactcgggaggctggggtgggaggatcacttgaacctaggggtttgaggttgcagtgagttgtgatcttgccactgaaatctagccagggcaaaagaatgagaccgtggttctaattttttttttaattaagaaaattatagaaccagaatgaaataagtgatttccactttttcaggcaaactagggctaccatttttaccattacagcactttcttaggaagtggggagggtgggcagggcaatgatggagaaaacatataatctacagatgaataaaaggcatttggtaaaatgtaacatcattatcacttataaaatagtaatagagacttccttacgacatcagactcaatgttcaaatatttgagcataatcactgaagttagaaacaaacccagtgaccactgttacatagcattgttctggaagtaccagccaaggtagtgagacaagacataaaattgaggaatcctaatccattggctactgctattgctgtaatagactgatactctgctctgacccaggagtcttttgtcttctgacagtgtccatgaaactggcaggctaacttacttcacagtagggtaaaatcttgatgagcttgggaaaatgtgttaatttcctttcagtgcagttttccattttctaaaataaatacaactcatggaattttgagggatgtcctaagaaaatgtgagtggcacatggtaagcacaaatgtccccattttaatattttgtattaataatttaattggaatgagtagaatctttgtgttttaaccacagaggatggtgcttctggttctctgcttctcttctctgatctggcgtttttacttcttacattgtaaccttcagatcctctgaactcagtctaaaagtctatcaagttaactagttatcttgttaatcagctttaccaaatagccaaagtcattatccctgtaatttttttgaggtataaagaataatgtattaattaattgacaatgaaactctgcaaaatgcagtctagttttaataaaatgaaagaaaacgatacacatgtaaataccatttatattttatctgtgttaacgtattatcataaaggcactattttgctctctctctctctctgtctctctttctttctctctgtctctctttctttctctttctttccctctcctgaaacaaaacaatcttatcttttgcacataccattctcatgatttttttatttttaatacatatatatttccataaacaatatccagttttgttttgtatttgcacagttcacataatagcatccctgtaaagtacccacttgttgttttccttctgttttataacaaacgttatgctttacagagttacccaggttgatttatggagatatgattcattttatctatagtaaagtatttcatgaatagactacaatctatccacctccccatcgggaagcaagttctttccacaaatactaatgccattttcctaatggagaaaattggactcagatacaggatggacattaaatagtactaagaaaatttctgctttgcactttacactcaaagaatgatacagtcatttgaattgactacagtggttaagtatgtcttttgagatttttccacaacacactaaatttacctcctagttactatctcccctggaagttaatagaaggtcaattacactataacagtgtaattgatggaggttggcagtattcaaacattttttcctttttttttcttttgcatgctaaattgaattgtttcctttgcgagatttaaagtgattgaagccagttttcttccattctcccccacgtccttgtacatataaaaaaagagagacaatttcttacagcctcaaacacaagattttaagaaaagggaggcaaatgttgaagttttcttagcattttatttatcatgaatattatcagtctgtttaaagcagtggttctcaactggggcaattttgccacctccactccacacttcagaacatttgtcaatgtctggagatatttttcgttgtcatgactggggtggaggtgctactggcatctgcggtggagaggccataaatgctcctaaacatcttacaatggacaagacagagacacctctactgccacccccaacacagaatcgtccagttctaaatggttgtagcactgaagttgagaaaccccctggtttaaaaaggcagaaaccaaaattacatccctcggctgccatctttattccaggagaacccttagaccaaggcctgacctgagcctatgaggacataagctaaatcataaggcagagagaatgttctctctgtcgccctcctatacatgtcagttaccccacacagccggttttaatttctgtcttttctccctgttatgtaattccccagcttcctttgaaagctccttcagctccacgtctgtgtatcctttggaggtggacctcaggtggctttgtttagctgagcaagtcaacacacttttcccttttctattatctattcccctgaggttgtcctccacagctactgtagtatctccacgcagcagcagcagtgggctgattgcaaagaaggtgagcaggaaacacccctggctgttctgtaagaattcagggcactctgcccactgccagctggccagtgttctcaagtttaggttggttcaattggagctaactttctaagtagaagacactagagctggtggcatttctgtaacacttgacagcagtccggaaatacgtggggatgtgaatgaagaacagggcagcacagcaagacagaaaggtcaatgacttgtgctgggttctcctgctgactagccacgtgaccttgggtaagtcactttcaatgaaaaatgactcacaaaatagacagtatgttcttaagctgcatgcacccaatagcaaacccagaaagggaaaagcggaagctcaccttccatgaacttcacaatctgacatcctagaagcaagctgtgttgatttcgctattcacataagttggattttaattttaaattgcaaaaccttttcagtgcttaggatttctaaaagtcttaattgagccttgactgtgaaggatgttagattttcagactccagacttctatctccaactatctcagggtccgtattaattctatagactgaaggcttttgacccatcccttcattaaacatacaattctgagcacttattttttattttttgagacggaatctcactctgtcccccaggctggagtgcagtggcgccgtctcggcttactgcaagctccgcctcgcaggttcacgccattctcctgcctcagccttctgagtagctgggattacaggtgcccgccaccacgcccaactagttttttgtatttttagtagagatggggtttcaccgtgttagccaggatgttctcgatctcctgacctcatgatccgccagcctcggcctcccaaagtgctgggattacaggcgtgagccaccgcacctggccctgagcacttattatgcaccaagcattgaactagatcttggaattggcagaaatgaatggtactatgaagtacaggacaatcatttatcagacatctattgaatcctactctatcagacaatgtatatagcagtcaactgagaagagttcctgcctttaatgatgtcacagtcccatataaaaatagatgaatacccatataaaaatagatggatactgttagagtcacagagtatagaagtacagggagggagataatataacccattgagtggtggagctttctggaggagatgacatctgaaaaatataagctatgtcaaggtctaaaggaattccgtacttgcatgtttgctttagtcctttcattgaatatttatggattatctaccatgtgatgggcaacatgagaagtttccaaaattaagagaacaaatagtcgtggttccaaacttcacagaacttatagcctacaaggacttagtgatcatgcaattcaaggctctcacttagaagatgtgaagtccaagcatatagataatattccttgtaagtctttttagtggcagttaccagaatagaacctgagtcctgtggtttaccataaagcattttaatactctgttgtattgaactccatagtggcttggatccttcaaaagagccgttctactatcttaagaatttgaacttctctgagaatggctgactctgcagctttcacagtttctgcttctagaaactgttgccctcttatctgactataaacttccagaaaagtcattcttctgggttatacaaggatacgttattctgtgggacactcttacgatgcatgctctttatcagctgctgagggaatttatcaggttacatgattctaagaaatgttggtccatggtcttcagtaattttcaagttttcagactgttcattcccacaatttttttcaacgtgtccttccttagtcacattcttcagttccataccattttttttaattgggtacttctgatcttcttttctggttgtatactatttatactccctttgctgctttggataatgagtacttgcttcctttgcatccgttcctctttatctaagtacaagctccttctcttccactttcagccaattatttctgctgaggcaaaacttctatgtgcagggccagggtattgaaataggaggcctaagatgacaagagctaagtatcaaattcctcctgtcatggttattattaagtgcttagaatgcaacctcagttgaccaattgcagagcactttaagacatttaaatgtgtaatttaagaagagcatttattttctgctgtacttaaacctggaatgacagaaggctagctccaccatgagagaaaagagtagacctctaggaagccactatgcagagtttaacaaagaaaccagggtagtagcagtccggccaagagttggatggaagactaaatcctggtgactttggttgacaccagggtacatccatgtttaaatagtttgcttgctacctcattttctaatatataaattcattgctagtatataaatacaaatgatttttgcattgtgaccttgaatccagtggtcacattttcctacctttttggtgtaccctgtaactttttaatgtaagttggaaattttgcataaagtaacactagatactgaactaaatatttatcctcaggaaatatggcctctcctctgtgtagtcatgagaatgaggcctgtttgatctgttgatgagctggattagcaatgccggcatttgtgggaagattattcccagtcaaagccctgggaaatagcaaatcttcaaatgttaaagaaacagaaagaaaaattgcgagtccaggatggattgaatgtgaggagatgagttttggggattcagcaagggcctgttatatagctcctattagagatttgtttttttcttttgaaagaaatgcattttttttttaagtaggggaatggtgtgctctaactttggtttctttttgttttgttttctgactgattgtcatgtggtgtagagataatgggctgtcaaaagacatggctcaaagtagacaagccagcagtcatcacagggggcatgagcgtttctttaacaggtgaggcagcagtaaaatgcaaagaagtagatggatacagactatattttggaagtagagatgatggcattagcagtttggggaagagagtagaggaacaaagaagaatcaaggacgattccaaagtttcttacttgaacaaccgagaaagtcaatattaactgagaagtagtaacggtaaaaaagaaaacaggtttagttcagtcttggacatggtaagcttaagaaagaggcctaataagtatcttcatggatttgccatggaggcagatgactatcaaaatctggaactcacaagagagctcaagactcaagataaaactatgggagtcatcagaagagttagaaaacttcggtgacccagaatagaatttctaaagcaagaaaaagttgggaagtgcatggaaaacatttagactcagacatttctttctgacaggaacacttaaccacatgatagggctgtctgttgtcaaaaacggaagttcttcttttgccttaagttggttcgctcaagtaagggccaaaactatggtctattttgtgcagggagattctgacagtatagaatttcaacgatgtctatgctttcagcaagacttcatgtgtttaacatttgttgtgaatagagccctaaaattttaccaccttccataaacatttattgtttttctgggtttccaactctaagcagaaagtcctagtgctttatcatatatttcttgaagtgtgtcagtgtcaaagacacagaacacattaagcatgtgagccacagcatataggtccctagagaaaagagacttagaaagaagcatggactattgttccctacaactatttttactacttgactaatagagttttcaccatccttattacatttttctattcagcctcaacaagctttgcagaccacatggctaatacaaattctggcaacatatttcacttcttttattgcacacctcaaaccttattacttgttcattgtattgcagttgggatttagatttttataaacatgttctcaaatgctgtgcactttataaatttatgacttttattgcagatcaataatttttatccacctattactcagcaagggacatactttcctgaatatgctattacctttaactttttaatccaggggaaattttaaattaaaaaaaaattctcagcacaagacaggcaagaagacagagaaaggggatggtgggattcgggaatacagtaggaagaatcatgagtacaagtcttttctccagcgatgtgtcaaatttcatgaatcagcagaactccttttttctttaaaaaattactgaaatggttgttcaaggacagtagtttccagccggggatgatgaatttttccttccccttcccccatagaaggcatttggcaacatctaaagatatgtttggttgtcacaaatgggaaggagttactcctggcatctagtgcgtagaggccaaagttgctgctaaacattctccggtgcacatggtaactccccacaatagacaactatccagccaaaagtgtcactggtgccaaaattaagaaacactggcttagaatctggggcctaatgattttgtccttgttcatgctaagacatacccacaaaaaacagttttcaatttttttgtgtatttctatttctttcacatttgaaatcattaaagatccacttttgatagactttcaaataggctaagattatctaatccttggagactatgaataatgtagtcatgtggatttatcaaaatgccagtgaatggtggaagttgaattccttagatatagtttataaactggttagggaactttaacctgtttcagaatagtctcacaagtcactggggtgaaattgttgtgaaggaatacatttaacattggtttcttcataaacacatagtcggctgactgaccagcaatgattttgtgagattaacaaatggaatgaaaaatgacatttatttattattttaaaatttcaaatgttccagttttatttaattggaccaagcacctgcatatcattttaagacaattacctactatttatggtttgaaattctgtatagtattttgtactgtattttattaatacaataaattaattatgcatagttcttatttatagctcttattctgattttagaaagtgaatagtttgcctagaacagatattagaacataaaacttttcaaaccttcttaaatacataatagggagaatttaagcaactagaggcataaatgtgcagatcagtgttacccaacatgtaggctgagtaatcctgagaaatgcagagtatctgaaaggattcttcaatgtacgtgcttcataagcaactatttaatagttgtaataaattgataatcactaacatttattgtgcaagaataacatccgaagagctttaagtgcatcagattatttaacatccccagaaactcagtaggctgacactattctacttccatctggaagacaaggaatgtagcttactcagagacgttagtaatttactccatgtcacatagctactaagaagcagaactgggtctgtctgtctcaagcccaagttcttcatatagaaatgctatatataaatggttttgttattattaaatatacaaagttgaaatgcattgctgaacatggagtactctttctgtcattgtgacctttctgaaagtattgaaaaataaggctccatacaaagttttaactttacacagactgagaatgacgataataaatcttctttccttgcatttatgtgtgtttatcaattattcacgcagcagtagagatggttgatgagatcttcccacagtaacttaatcatcgatcatgaaacaacacatggactgttctacctttgtctctagccttaactttctacttcaattaataccatttccagatgtcttactgtacctatgaaaaaatacgtaattgttttttgcagggccatgtaatttaattgaatcaggatatgtgtctccctcccaaactaattaggttctcaactactcttctgtatgatgagaatattatggctccaaatagcaaaacttcatcagcatggttagctctgatgccccaggaggcagtgacggttcctaggaactggagcttggcaataaaagaaaatggaatgaatatactttccatatcaggttctcccttaatatttctgccatgaggttactcatcatgttttaaaagaaccagtgatacggaactcacttcacttcctacctaggcatctatttcaccttcagacagctttaactttttttgttctcacattgagctgaaatctgactctgagaactgtttactcttggactgtaagtgcaaaataaactaattagacaaagattcaataatttattaacttctgtcacagactggcctcaccaaagtatcccatcgccatgaccttgacataatgctatgttaacacccctccataaagtctgtactttctccccttgaatctgggtgggcctgtggctatggtgggaggaacagtatctgcctggtccttttaggatgcttgcctttgaattgcatcccctttgccatgaggcaaatctccctcatagatattatattgtcatggggagacaaaaaataaacatagagcaggaataaaacataaatattgacctccaatgctataaagaaaaacaaaaatcctaaaaggtagtaactgataaaagtagggagagatactaattcacatatggtcatttggaatagacacttgaatgaactcaaggacaagacaagtagatatctgggaccatactgtttcacacagaagggagggaagtataaatggcctgaggcaggtgtgtgtctgatatactccagtgaaagcaaggaggccgaggtgactgaagtgtaacagggcagaagggagaatggtaagagatcgggtcagaaatagatgctggaagtcaacatacaaaagacctggaagagcctgcattgctcatgagatgggaagcccctggggggtgaatgaaggagtgacttgatatgactcccacgtagaaggatgactgatgacaagcaaggtagtcaggaggacccattaggaagttgctgccatgggtggaggggaaagttgatctcagcctggcgagtctagcagtagttgaggcagtgagaagaggctcagattatcatcatcataactatgggtacttttttattgttaaaacatacattcacatgacatcatttctctgcagttactgttgctagtattgttggcaacagttatttgtgagtaaaggtgaagaaatgaaggcttggagaaaaccaatgatagcccccagatagcattctatttatgtttctctttgtctctcaaactaaatgaggttggtattcaaacctagactttccaacttcatgtctatgttagtttactaggtaaacaggtaataccacttttctgatttaaaattcatgtttagtacactcaatatttagaaaaatacacaaaaaatgaaaacgaaataattcataatcttattatgatactctgagatattgttggcattctggtgtattctcacactatatttttactacttttacattttatgtaatagaatatgtatcgtgtttcataggcaacatttctattttacagtgtttcatagttatgagtttagaattattttgcaatatgattatgaatggctacatggtctcaatgtactattattcatttaaccaaaccctgatggttagacatttaattttttaaaaaaatctaccttacatgatctaagatgaacatcttacttgtaaaaatactcgtataaacaattctttttgacaataaattcctagaaaggaaatttttacatcaaacatatgtaaaattttgcttcaaaaaaacattaagagaccactctctacaatcataaaattaaacacctatcaagagtttgaggccaggcgcggtggctcacgcctgtaatcccagcactttgggaggccgaggtgggcggatcatgaggtcaggagatcgagaccatcctggctaacacggtgaaaccccgtctctactaaaaatacaaaaattagccaggcatggtggcgggtgcctgtagtccgagctactcgggaggttgaggcaggagagtcgcttgaacccaggaggcagaggttgcagtgagccgacatcgcgccactgcactccagcctgggcgaccgacagagtgagactccgtctcaaaaaaaagagtttgaaggtatctagttccctgtaatcccatcaacattcatctttgccaaaaggaaaggaaaaatggctcatcatagcattacaactggctcttcctatctgtgcgtcctacatctgtagacttaaagaaaattgtgtctgtactgaatatgtatagactttttcgtcttgtcatttgtctaaacaatgcagtataacaactacttacatagcatttatattgcatcacgtggtataagtaatctacagatgatttaaagtatatgatagggtgtgtgtagattatatgcaaatactgtgccactttatataagaaacgtgaacatccacagattttgatattcccaggaggtgctggaaacaatcccccagagatatcaaaggatgactttatttacaaatgcaaaaagcaagcaaacaagcctttaatatttgacaatagaaaattattatatgaattgtggaatatttaagtggtgtaattttatccttatacatttgaaattaatatgcccttaattattacccattttacaaacatgtctatctagatctaaacaagtgggtttttttgtttgtttttgtttttcaaggagcaaagcagatacaccactggttgccatatgatgagattaggtggtacatggacacagtattacattcagctaaataatgagaaatttggctccttttaaatttccttttaatttcaatgtggtactaaccttaacttttttctagtactaattttccttttgataaaaaaagcttattaataattgttatttaattttaatggtaataaaatagttaaaacttgcacagtaatttattatatgtcaggcatcgttccaagtgccttacatttattcgcacattttatcttcatcacaaccatgccaaataacctgtagaaatttcatactattgttttatgtcattataaatttttgtgccattatattccacatatggcaactgatatttctatctagtttctatatatatatttgggtgaaataagttgattaaatgaaaagaacctcagttaaagattagcatattgttatagaagagatcatgaaagtgatatgggaaagattgaaatttgaggatcattagtctagaggggtgtttctcaaattttaatatacatttgattcacctaaggagcttgttaaactacaaattctgatccaataggcctgaggtgggctgatattcggcattcttaactagctcctgggtgaggccaggctactcacctacggactaaactttggaagagcaagaatataaaaccctgtcagccatgtgcataaagtcattcaacaggtgaagaaaattagaaagattggtgttgaattctggttacttggactctggtgcaacatccaatgtatataaagctaactaatttcataatttgtatgatgcaaaatattcattaataacatatatgaagaaattcccgggactcttacatttttctactggtgctgaatcaggaaaaaataaaaaccaatcttaatgtatttatctttcaacttacattttagattcagagtgtgcatgtgcaggcttgttacctggatatattgtgggaaactgaggtttggatatgaatgattgcatcacccaggtactgtgcgtagtacccaacagttgatttttcaaaccttgccccactccctccctcccaactctactagtctccagtgtctattattgacatcttcatgaccacgagtaccccatgtatagctgccacttacaaatgagaacatgcagtatctgattttctgttcctgcattaattcacgtaggataatggcctccagctgcatccatgttgctgcaaagaacatgattttgttctttttatggctgtgtagcattccatcgtgtatatgtaccgtattttctttattcaatccaccactgatggacgcctgggttgattccatggttttgctattgtgaacagtgtccttttggtagaacaatttgttttcttgtggatatacaccctggattgggattgctgggtagaatgctagttgtaagttctttgagaaatctccaaactgctctccatagtggctgaactagtttacactcccacaacagtatatgtaagtgtttcattttttccacagcctcaccaacatctgttgatttttgacttcttaacaaaagccattctgactattcgagatggtatttaattgtggttttgatttgtatttctctgatgactagtgatgtggagcatttttttatatgtctgttggccacttgtatttcttcttttgagaagtatctgttcatgtcgtgtccctattttttaatgcgtttttttttcttattgctttaagttccttatagattctggatattggacttttgtcagatacatagtttgcaaacattttctcttattctgtagattgtccatttactctggtaatagttcacagaaaaagtgcagaagctctttagtttaattaggtcctacatgtcaatttttggttttgttgcaattgcttttggggacttagtcataaatatttcccaaggtcagtgtccggaatggtgtttcctaggttttcttctaggatttctatagttagaggtcttatatttaaatatttaatccaccttgagttaatttttatatatgatgaaaggtaggggtccagtttcattcttctgtatatggctagccagctattccagcaccatttagtgaatagggagttatttccacactgcttacttttgtagactttgttgaagatcagattgctgtagaagtatggctttatttctggattctctgtttcattggtctatgtgtctgtttttgtaccagtaccatgctgttttggttagtgtagcctgatagtatagtttgaagttgggtaatgtgatgcctctggctttctttttccttagaattgctttggctatttggactctttttgttgttatcccatttgaattttagcatatttttttctaattctgtaaaaaaaaaaaaaaaaagacattgttagtttgataggaataatgttgaatctgtagatttctgtgtgaagcatggccattttaatgttattcttatagtccatgagaatagaatattctaccatttgtttgtgtaatctattttttttaggaatgttttgtagttctccttatagagatgtttcatctccttggttaagtgtattcctaggtattttatttttgtgtggctattataaatggtattgcattcttgatttggctctcagcttgaacttcattagtgtatagaaatgatactgatttttttacattgattttgtatcctgaaaacttgctaaaatcatttatcagttctaatagctttttggtggagtccctgggattttctaaataaacaattatatcatcagcaaagagagatagtttgaaaaggcattctttttcctatttgaatgccttttatttctttcccttgcctgaatgatgtggctagcactcccaggactatgttaaataagagtggtgagagtgagcctccttgttttttttttccagttctcaagggaaatgcttccagcttttggccattcagtatgatatggctatgggtttctcagagatgctgttgttattttgaggtatttttcttaccacctagcttgttgatggtttttattatgaaaatatatcgcattttattgaaaacttttttcgcttctattgggatgattatatggtttgtgtttttaattctgtttatgtggtgaatcacctttattgatttgtatatgttgaaccaaccttgcatctcaggaatgaagactacctgaacatggtgaattcagttttgatgtgctgttgaatttggtttgccagtatttcgttgaggatttttgcatctattttcatgagggatatggacatgtagttttgtttttcatttgttttttgtttgttttttcattgtgtcttcaccaggttttgctatcagggtgatgttgactctgtagaatgagttagggaggagaaccacctcctcaattttttggaatagtttcagtagaatgagtactagcttttcgtcatgcatctggtgaaatttgactgtgattccatctggtccagggctttttgtggttagtaggctttttattattcatttaatattggaactcagtattggtctattcaggatttctatttcttcctggttcattcttgggaaattgtacattttcaggaattattcacttcctctaaattttctagtttgcatacatagagtatcttttgtatttctgtgagatcagttgtaatgtcacctttttatatctgattgtgcttccttagatctttttttccccattaatctagctagaattctgttgatcttgtttatcctttcaaaaacaaatttttgatttcattgattctttgtatggatttttggatgtcaattttgttcagttggtgctctaattttattttcttctgctgccttcagagttagtttgttcttgtttttctagttcctctatatatgatgtttgatcattaatttgagatctttctaactttttgaggtaggtgtttagcattgtaaactttcctcttaatattgcttttactgcatctcagagattttggtatgttctgtctctgtttacatttcaaagattttttaaatttctaccttgttttctttatccaaaagtcattcaggagcaagctgtttagtttccatgtaattgttggttcggagagatcttgttggtattgatttctattttcattccactgtggtctgtgggtgtggttggtataattttgatttttttggaatttattcggacttgctttatgactgagcgtttagtcaatctttgattacatttcatgtgtagatgagaagaatgcatgttctgtggttgatatgtacagtattctatagaggtctagtaggtctaattggtcaagtgtcaaatttaagtccagttttctgtctcggtcacctaatgttttcagtgaggtgttgatgtccctactattactgtgtgactgagtctttttgtagggcttcaggtacttgttttctgttttgttttattttattttgttttcatactgggtctcactctgtcatccaggctagaatgcagtgatatgatcataactcactgcaacctcaaactcatgggctcaggtgatcttcctgtctcagcctcctgaacagctgagaatacaggcatgtaccactgtgcctggccagtgtgtgtgtgtgtgtgtgtgtgtatgtgtgtgtgtgtataaatatatatatataaacatatataaatatatataaaatatatataaaatatatataaatatatataaaaaatatataaatatatatatatatttttttcatagagaccaggtcttgttatgttgaccaggcttgtctcaaacttctggcctcaagctattctcctgccttggctagaagcacttgttttatatatctaggtgctccagtgctgggtgcatatgtaattaggatacacaagtcctcctcttgaattgaatactttatcattaggtaatgcccttctttgtcctttgttacttttttttggtttgaagtctctcttatctgatataataggaacccctgccctttattttctgtttgcatggtagatctttctccaaccctttactttgagtctgtgggtgtcaatatgtgtgaggtggatctcttcaagacagtagactaatgggtcttttttactgtaatccaatttgccactctgtgccttttaaacagggtatttaggtcagtattgggatgtgagattttgatttggtcatgaagttattagctgattgctttatagtttctatcgtgcaaaatcctttttaaaaagtaaccccaaatataaatcctccaaacaatgtaatttacatcagctccaaacaatgattttcctttgattagatgagagagatttcctccagctggaatgtgcaaaatataatttgagctaaggcaatgaaatctgactcatttcttttaagggattatttagtgcagccctttcttaattatcttttaatcttatcttttaatttctaactcaccttactggatcatatgccttcagattacaatatgaactctctctgtgctagacaatcaggcccattcacctcatcagccctgaactcgtcagctaaaacaaggtgacagagcctgacattccagtgctcactacagtaaaagtcaagcagctattcatgttgcacagctgccacgtcttctttataaaatattcattcacattatgtcattttttattcagctgccaaaaatgaaacatttgaggaaccttcaagtcatcagaatgcagtcgttgcccatagaggcccatgtcaacgtatctaccattaatttggagtgtggatgggacagtggcccttgcacttctgtcaatggctttaaaaatgattagaaaaaagttgcctagaatactgtcggacattctcggctttcattcatacacagttggagaaaaagatcatatacattgcaaataaacattttgtattgtgatgaaatacccatgaaatttatcatcctaaccatttttaagtggacagtccagtagtgttacatacattcacgttgttgtacaacatcaccatccatctcctgaactctttgcatttgcaaaactgaaacttgataccattaaacaactccacattattacctccttcaagcccctggaagccattgttgtcttctgtttctgtgaatttgactaccctagatacttcatataagtgttatgccatatttttttgtgtgtgtctggcttttttcacttagcataatgtcctaaagtttcattaaagttgtagcatgtgtcagaattctcattctttttaaggctgaataatattccagtgtaagtacagtatatactacattttatcagtccatccatcaatggacatttgggttgcattcaccccttggctattgtgaatgatatggttataaaaaaggatgtgccaatatctgtttgagaccctgcttttcaattctttttttatgtactcagaagggaaattgctggatcatacggtagttctaattttaattccttgaggaaccactacacttgtttccgccatggccacacaattttacattcctaacaatagtgttcaaaggtcccaccttttcaccagtaatttttattttctgggattttccagtggtagccaacagtatattgtactttcaatgaaatattattcagccttaaaaagaatgggaattctgacacgtgctacaacattaatgaaactttaggacactatggtaagtgaaataagcctgacacaaaaggataaagatggtgtgattccatttataggacatggaatctcaatgtggagaaagcaacattcctaaaaagaaacaaaatcagccagacacaaatggacaaatatggtatgattccacttacatgaggtagtatctcaatgtggagaaagcaaattccttataaaaaacatcctggagagaataatcagaaaatgggctctggtaagtgccaaggaagtgcattaggcaaaaatggcatagcttgccctcggagatctcaaagcccaatggcagagtgttgtgctggacccctgttaacttcagaagggatggcaccaagttcaggaggccgaagaagagacccagaaccaagaaatgagatacaggattttattagtgggaagcttacaaacagggcagtccagtggcagtgggctggacaggagaaccacagtcgcttgcaaaaaacatgcagtttatatagcaacttagcaccttccccttaacaaccttcacctggaaacctttaacccaaaacacggggcctctacggcttgtatggcccacatcccacgggatgggcagagggctccagtgttcctcctagataagaaacaaacctctgggttgcccaccctcagattccttagcataaaacgcagaacacacattcatgtgtgtctgtcatatggggtcattctcagggtatgcttaagctaggttattgctgtcaagtacatctaccacacagagatttcaaaaggaaaataaaaagtaaagctctttcttactgacaacttttggttaatcacagccactcattttcacctgaccttaactcccacagatagtcaacaactcttagagaaggatttgggattaattccaacctatttccatagcaaagaaaacatgtcaaatctcctaagcagtgggtgaagatgataatcatgattttcaaggagtattgtgttaaattcctacttttgaaagttttgcatattatcacctcaacaaaagaaaatcctaagtccttctttaagctctacagagtgtaaatatattgctcccttgcccccaagtggaaacataaatgaagggaattatgaattaaaattatatcagttatggatggaataatgctacacacacacacacacacacacaactaaattcactgccttagaacaaaaataatttactgatatggataagacttaagtcagctggggcatgtcttcagaccggactttgttggacatgcgtgattcaggctgtcacaactagagtgggccagggtgtactcaggtgtgggtgacttatgcttcttggacagatggtcttgccagggcatgtactgcttgtggcagtagcagaggcaagacagcaagcagaggcgcgcaatgctcagaactaccatgctgacactcatcaagggacgctggccaaagaaagtccaactcaaagtcaaagggtggggatgaacaatggcaaaggggtggttgcgtggaagaatgaagaacagaggacattcattcattcaatcaactacttcagctgccatttcttggccattctctgtttgactctaccgtggaaactaaaagttgagctccatgctctgtgagttctaagccaagaagagttaggttgtttcaatctgctctgctatactttcataagcattgtcccctctgctgcttagggcatcctttttctgacccatcatcataaaactgaagttgccctcaaattaaaataattattgactcttaatccagtctatcattgttggacatttggattggttccaagtctttgctattgtgaatagtgccgcaataaacatacgtgtgcatgtgtctttatagcagcatgatttatagtcctttgggtatatacccagtaatgggatggctgggtcaaatggtattaagaaaatgtggcacatatacaccatggaatactatgcagccataaaaaatgatgagttcatgtcctctgtagggacacggatgaaattggaaatcatcattctcagtaaactatcacaaggacaaaaaaaacaaacaccgcatgttctcactcataggttggaattgaacagtgagaacacatggacacaggaaggggaacatcacactctgggaactgttgtggggtggggggagggggagggatagcatgaggagatatacctaatgctaaatgacgagttaatgggtgcagcacaccagcatggcccatgtatacatatgtaactaacctgcacattgtgcacatgtaccctaaaacttaaagtataataataataataataattgactctaacagaatgtagaaaatcttaagctgtgtgcagagtagtaaatgcatcttctcttcttttagaaacttttccagggaagcagatactgtgtgtttatctaggcccaagcttttctctctgcagtactgagcaccacaaacagcagcctctattcatcagcaactacagaggaatcttctaaatggtgaactagtcagccaagatgtatggaaaagtccatgtgtgactcattttccaaatagaatgtacatcattagaacaatgcaaataaattctcacaattgtccctagtcttgggatatatgtgtagaatgcgctggtttggcggaagaattcaaattaatagatgtgaccttccagtgactttgccccacattctcataaatttgttttatttgctaacaatgctccggggagagatactctgaaactttccaacatgaaaactcacaaatttggcatgattttataattctaggagtccattaaaaataaaataaaagcaggattgtaacttaccagggtgcctttgtgttttggtgaagcttggaaattattcataatatatattttggaatttaagtcccctattcttccaaaagcaaattttttggtggtgttattaaacatcagataataccctgacaaattgttgatgaatgctgcctgcagacccagctgtgtgaacagcattgctagtgggaaaatgagaatgttttctgatgccttatggaacccaagcagcaaaactaatatttctgtgttcatttcttcctattttcttctgttgtgcatgatattggaggcacagcagcaggaatttgacaggaagggaatatttaaaacacagacaaaatgtctctgtcctctctggcatgtcgtttcatttgtgagaatctgtcagccactggcatcagtcttcatcttcgggttcacagttttgttcacacttcctaaaataagctaatatacttgatacacagcacattaaattctgcaaatggcacttggttgaactgtaatatctagtgaagcttccctccccaaatgcaagctgcctgccttcgggaaatctgttcattttcttcatgttcatttctaatatcttacacaatacacttaaaatattccttgaataagtaagtgatggttacattccaccacctgcattctgaagttttgtcagcctgttcaaaaagcttggccatgtgacgaatcactggagaaaatgttcttaccttttacctggtgttcaagactgtcaacattctagctgtgccacgcctatagtcactattcactgggtgctactctatgaaaacagtattgggtcttggtgttgtcacatttagtcctggttcaaataacaactccacttacattgattgtgcttgtttgagaaagttatcagcatcttgcatcttcagtttctttgttcattaaacagagacaacaataacaaacagtgtatttggtcattgtgaggaataaatgtacgactatatgcataaccagtgtgtggaacagttaggtataaatgtggccataatcaaaattcaattttgtttgttttctcttgtccttttaaaatatgctcactgggagtcatcttcttttgttccctattaagaggaaggtgatggtcaagatttcaagatggtcaagatttattcagggaaagagttacaagactagttacgagaatatgacgcagagccatcaactccatcttccaactacagggaatccattccggagttccacggctctccttagatcacccgtcactaagcttggctgaggacctcatcattgtttatttcacaaaattatctctctaattatcttgaccctttttataattttccttagatcatccatcactaagcttggctgaggacctcatcattgtttatttcacaaaattatctctctaatcatctttgaccctttttataatttctaaatgggataaggggttcaagaggtatgcagtggtttggatcctttcctttgaaaatctccataaagcagttcacactcattatggtatctgttacccattctttgggcaactcagggaaaaaactaaagcattatccaaacttgttacaacatagcaactttcattttgttagttctccaaaaatctcagtcatcataattaaagtcctcaacaactctaagggaagactcttccagtcagactttttcattcctaagcacccatcccagttctttttatattttcctaggttaaggctcttttgcttatcccacattcctttcccagaactttttttccaattcctctgggcctaaccaaatgctacctgtttcaaaacacacaacctccccaaactaaaaatcactccattcatataataacctggaagaatccaatattaatgacaaactttttatatttcttcaatcacctatttattgaataaacattaattaagcactatctagatcacaaacattgagaaaaaaataaagacaagacacagacccatgctccaaggcacttacattctaactgagaaaaaaaaaaaatgtgatttgaacacaatgctaggactgacatgacaaaggagctactggaagacacctaaccaaaggcctagttagggtatggctgcaacgggttagagaaataagtgtcaaggaattcatagaagagtgttacttgaattgaatcttcaaggatagaatgcagtcagccagataaaatggagaaaagggttccagctaaggaaggctgtgttggcaattaatctatattaatgtagattatctcaaactgctattgattttttttctttttctaacttttatttcacatgagaaaaattttatctcatttcgttcattacaaggattttcccactaatgggttttttttttccaaagagaattataatatacgctgtacatctctaggaatgataattttattgaccccaaatgggaaggagttctataaaaagattcctacagtgtttgattcatgtagttagtgggctgtgattgaaagcagaagcatgagacattttgttttatggagtgaaggtccatttagctcaccattatttatcaccagaaaccagcaccatgcctgaaccaagattgtcactggagaaatattatgtgactgaataaattagtagtaagtaatttggccccttgatgaatgcatctgctgagtagaaaattccgaatcttacctatacctgggtgtgtcaccttctcaagcacttagcataacctgagtatatagcagaactgtattttctagcctcattgtagttagactgttataatgtgactgagttacagccaagagaatataggcaaaatggtgagcatcacttccaggactgaatcatacgtctcccctttgcacaattttctcttttctcttcttactctgcaagtctatggaggtcacatgttgaagatgatggtgattccaggtggaaggaacctggggtctctgaataactacatagaggacatccccacctactcttccatgtcaaccaataagtcattagagaaaagtagataatgcctgctctcaagatgatgaggcattagataattttgaagcatttagttttaaagacgtatctttatccgaatgcatgataatgagtatctttcatctgtggcaaatttatttgccggagtgatatgacgtcttcttatcaaataactgcgttcatcaaaaatgagttcatttaaaaatattaaataaatatgtggatgtgatacaaatatagataagacaaaagaaaagttaaggatggaattccagaaagcattgcattaaaatagtataattttggacatccctggctgtactggtcgctgtgatgtttgagaccactattcctgtgggtgggcagagacctatccttcatgaagaaggtgtagatgccagagtacagtgagaaaaacagaatcatacaaggtgttttcacagaatttaatacaaggaatttgcttaaggggtatgagaaaattgaaaatctaaaggggacagtgaagcaatacaggcatgttaaatgcacccataaaaagcaggaggtgcaaccacactgtctagggctgggggattacgagaaagatattgggattacaagaatctagaatctttaggatgtagccccatggagctaggactcagctcagaaaggcaaggctggcttgttctagtgccttaaaaccttggcaaagggctcagtagacattttaccatgctagtcattctttttttttgtttttgtttttgtttttgtttgtctgtttgtttttgagacggagtctcgctctcactctgttgcccaggctggagtgcaatggcatgatctcagctcactgcaacctccgtctcccggctccaagcaattctcctgcctcaggctcctgagtagctgggattacaggcacgcaccaccacgcctggctaatttttgtatttttagtagagacagagtttcatcatattggtcaggctggtctcgaactcctgacctcatgatccacccatctcggtctcccaaagtgctgggattacaggcgtgcgccaccgcgcccggcatgctagttattctttactccatgcgaaggcattttctgtcccacgtgtgttgtgttcttttattctctcatacccaaacatattcagccaagaataatcacaatgaatataatattaaattaataataatgacaaccacatggactaaatgtgtcatttacagtgctaaatgcttttcacacattttctcattttctcattttctcccttaatattcaaaatatgtatataagtcagaaataattatcccagagcctaacattttacagctgaggaaactatgattctaaaggtaaagaaaactgtgcaaggtaccaaagttaaagtagtggaactatgattttaagactttttttttttccctgattccaaagcgtctgtttttaatcattatgctccaatgcttgaatcttcaatcatagattattaaaaagtaagttatagtatatccacacaagggaacattggacatctgtaaaaagtggtattacaaaagtacgattatttatgtgagggaaaagcaggttgtaaaagggtgtatacgctgatcacatttttcttttcttctttttcttttttttttttttgtttgagacagagtcttgctctgttgcctaggctggagtgaaatggcattatctaggctcactgcaagctctgtttcctgggttcaagcgattctcccaccttagcctctggagtagctgggattacaggcacccaccactaagcccggctaattttttgtattttagtagagacgggatttcgccatgttggccaggctggtctcaaactccttacctcaggagatccacctggcttggcttccgaaagtgctgggattacaggcgtgagccaccatgcctggcctgatcacatttttcttgggaaaaaaaaaaaaaaaaactgtttataaaaaaatgaataaagatgatcactcagtgaagggttaggaatatttattatctttcagaaatctatatttacctttataaaagtaagcatgtgttacacaagacacccatttatactttttttctttaaatcaattactttttcatattactatgctggaactatatgtagccatttagaagcatgttttaaagacatagttcataaaaaaagaaagctttcatgataaaatatatatactttaaatatgttcttcaccatgactctgttttgttagtttttaaaagtaaaatatttaagggaaaattaatatgtgttggcaatctctggatacaaaaagccaggtgattttaatttttttccttgtacttttttagttttatagttgttttctggaattaaccatagaacaaaagagctagtattgtgtgtgtttacctgtgtatgagtatgcatatattttattctagacaatgtcctaaatgtttagaataaaacatagcttatgtcatttaaatttattatgaggtagtttccatttctacattctttacttgagtgtactaaagctgagattgtttaagtgacatgttcaaggtcactcagctaataggcagcaaagccagaattttaacccagatctataaaaaccaaaaagcaagaccttaatgaatactataatgctagtatgtatatttttaaatcaccctactaaattaactgaccttttactctttgatgagactaaattgaatttacctatataataacattaattcatccaacaaatatttattaagtgccctactacatttgacacatagtgccctaatagagaacaaaacaaaacccactctggtggatttttatattctactggaaagtcatagaaaacaaacaaacaaataggtctgactttgaaaaaaatgaatgaatgaatgaataaaactgggtaaaaggctgtcaagtaaatatggtgttctgctttttctgatgaggtaacatttggatagaggtctaaatgcattgagggaaaaggcaacattgatatatttggggacagtttttgaagcaagaagaagattaaatgcaaagctcctgaggtgggatcaataggaatagcaccatgtaaccaaacagagaggttggttccaggtagggtgcagatgaagtcttatataccctgataatgacattgtatatatgaaatgggaagtcatcctagagttttaagcctagaaaatgtgattatctggtttatttaaaatatattattttcaataatatgagattagattttccagtatagaaacagagcacgaaggttactcgaaatgtccagataagagataatggagccagagactgggatgattcacagttgaagtgtatgaagatgttcagtaagcaatcttctttcatttttttctaatttaataatataatatctttaaaccttggatttagccctgggggacttaaaatggtaaggattatcttgggggagtcaggaggtgaagttaagctctagacagcattctgatggctgtgggtggtgtaaaaggtagtacatctgcgtctgttcaattattatacccacaaattcacttcagatggcaaatctactttgggactcagtggatatgggccgggatatacaaatctacttaggaacttaccagttaacaactacacatatatatctaccatggatagccatttcatgaggactttctcatatatatatatatctctctctatatatatatagatatatatatacagatatatatacacacatatctatatatatagagagagatatatatatggacttccatatatatataaatatatatgaggactttcatatatatagatttaaatatatatgaggactttcatatatatagatataaatatatatgaggactttcatatatataggaatagtaccatgtaagatgcaccatgtaatatataattcatatatatgaatatatatgtgaatagcaccatgtaatatataatagcaccatgtaatatgtaattcatatatatgcgtgtatatatatgggtgttaaattttaaatgaactctgctgaacatcatctgtaatatttctctagttagtaagctgaataatggtctattaaaaatgcactctattctctcttcaaacaagaacaatttaatgagtggcagtggattgttttgcatttgaaaaatatttaagttgacttgccacactttgatttcagtgcaggttgtgtgttatttttgtgttgtttcaaaccacacaggtgtcatttctcaaaatgatctggaacataattactcatcaatgagtaggaaaattttttcttagttctttcttcctctacataaagattgacattcattttcatagagcacaattttgaggcttagattttaagctttctaattgcatttgcaaataaatgttatgcttcctgtaattgaataatggaaacaggaaatgctagtttatctcaataagataagcatcatcattgttttcctatttttctggaacccgtagggccagattcagcacttgaggtaacctgcaatactccagcatctcaattaagaaatgctttgagagacattatgaatatcttccaattcttattggtctaggttgtagatgagaatcctgacatctgttctttgctgttctcaaagtgcttttctgtaatcatttggtccttataccaccttcagcattagggaaatgaattttactttcatgttttatagaaatgggaactgacatgctgagtgattaagagattggccccaggtcatgtagccaaaaaatgatggagaagagagtcaaacacaagtatgcagattggaagttcacagttcattttgtgcctccactgtccctcccagtttggttggggtagatgcaataataaaccagactcctccaattgtaagtgacaaacccaattcaacctggtttaagccaaaacatgaatctataacgtgatgttagagtccacaagtaagactgctataagactggacttacaggtaaaaatatgcttacagtagaaaagacaaggtagaaatgctattatcgcaaatctgtttctctctatcagctctgccttctactccatcagctttagtttcaggctccaagtggtggtgtctggtcagtccagggcaaaagagaaaactcactttctagtagttctagcattgtctttgtccatcttgtgttgccataacagaatgcctgaggctgggtaatttataaagaaaagaagtttatttggcttataattctggtggctgaaaagtttaagattgagcagctccatctggtgagggcctcatggtgcttccagtcatggtggaaagtggaaggggagcaggtatgcgtaaagagatcacctggggaaagagaaagcgagagagaaaccaggaaggccagacactttttaacagctcactctcatgggaactaatccatccctgccagagcaagaactcccttaccccacaagaaagggctttgatctattcatgggggatgcacccccatgacccaaactgcctcccactaggttccacctctcaacatggccacactggggatcaaatgtcaacatgagttttggtgaagacaaaccatatccaaatgattcactgtgactgaatgacttggatcatgtgcccaccctggaccaattgcatcattcagaaagataaaattactctgattagccaggcctaggtctccattcaaaccatgtggattgataatagagaactaatgtttcctccaataggctcagggtgctattacaaaaagaaggataatagcaaaacagatatccattacaaacttataagaaaatgagacaattttgtctgacctggccctgacattttcagtttttttttctctttaacaattgtgttaagttgttttttaacaattgtgttgagtgtttctaaaattgcaatatgaaaatttgtcgttgattaatttaaaatgtctgttaataatttctgttaaatgcctttcaactttgtgttttcctgtctccgtcactctagcaggcttctggtatataaataaatggcgatagcatacaacagccccagcaccaggctgagtggattcagatcacagctctgtgacttttcttgacttggataagttagttaacctctctgggctccagtcccttttcttcatttgtaaagtagagataaaaaagaatactcacttcatggggttgttgggaggatcatagataatgcctagaatttgtttggcatgtgtaagtgttcagcaaatattcaacctgattattgaacaaatccctaactgattggaacagcttctggaatttaggaagttatcagtgaatattactatttgctttcttcccttcacccagcagcatttttgggggtctcaagaaagggtagattcaaatgttctcttttacattgctttcgattctcttgcaatacatgcaagatgaagcctttacaaattgatgtatgtgaagcccacacatctggctagttgactgtggttctaattgcccaatctaatgcttttagaaaataatcactttcttgcaaaacaaacaaacaaaaaatttgtacttggccaaagggaaatcaatcctgtgttctgaatagctgagttctcctcaacatgcagagcaacgctcagaatggaaacaagcatgtaaacaacagctacagaaaattcaaagcctaggtacagagcaccttgattcagcacctctgggaaattagaaacagtctcttttcaatttagtcttaaaaaatcagcttcatctactatgttcttaagaaaaatggaagttacagtcaaaattaagtttcttgttacctgtatgagagtgaccattgtccctgtttttacatgaagctgtaaatttgattataaatacttgcatacaaatgtgaaacaaaagtcctgggtgagaagacaaagcaaaggaagttacctccaactgtccaagtcattcatatcaatgaccagcttgggatcatgtcattgacctttgaaaatccccattgcctgcaccaccagctacctccaattaagccaggtttttgtgtaactgtggttgaatatcaagtggatcagcagactcaaagcaggagttgatgctggatgctcccatattaatatgacaatatcatgattattttggtatttttcttagtagtttagatgtatatagaacttcaggaagcacttacattttctaatagcattcactctaaaataatcactaaaatggtttattgtgttccttttttaaatgtggagatggaaattgtaattcagggaggtttgacttacgtaaatttgtgtggtttgtaagcagtaaggaagccaggcaaaagcaaacactgagtcagtgtagtatcataattagggtgagtttgggagctagactccacgtatatggttgtatttaacattctaagactgagtttctacctccacaaataattataatgagatctgccaaggattaaaccagttaatacatgtaggacattgatcacagggctcagctcacagaaatgataattgcaataccattgcaataatggtagcttttagttttattatttccattctcactctagaatttttcaagcaatatattttatttcctcatagtcaataaaatgcatgtatagttccaggcatgagcattttctgtagaaaaatcaaaatgatcttttctatttccctggcaaaatatagtttctcaaattagttcttgatagacaaaatctccagcacccatacaactattgcatttgaaaccagacttttggggattatatgtctagatatttgctaaatcttcattgaaaattgtttccttgcagaacacgcatgtttaaaatagccaaagaaatgtgcgttgaatcacctagattattgacttaaaaaaattaaatgtcaaatatcttcctaaaagctttctgacagaatgacaagttaaatttttcacaaaacagtttggcctctaaaacaatcagttgcaaaatgccagaagtaaccaggaggggtgattcatgacttccacacctgttttgaggtaaagaagccaacagtgggttgcaattacaccaaggcagccatgtggactccccctccttcttggccaattaatgctaaaaaaagatcctttgtatttgtgaaaaagatgacttgggcctatctcttgaaaattcaaggttggcatattatgggtgcatattgaaatattctgatcattaggcaaaaaagagactgtaaataagttggctttcataatgctatttttcaagtcaacttattacttgcagggtttctcaaagcatgacacatatctcacctttatgaaaatcatccagagtacttaatataaatttgggttttcaggccctgccttggatggactaaattagaatcttagggcataaggccctgaaatctttatttctaaaaagaaccccaagtgatacttttacgaatgggttgaataagctttgtatgcacgtgtgcaaatctttttaaataatcctacaagaaaaaataagtcaatgcttgtttggatttcaatccagaatgactctgatccctttctaaatatttatcttctcctcacatgtgcagtcccaggtttcatcctaacaataaatttcaataagaaacagctctaagaactctagcagcttgaagctggaggccatcattctcagcaagccaagacaagaacagaaaaccaaacaccacatgttctcactcataagtgggagctgaccaatgagaacacagggacacagggaagggaacatcacacaccggggcctgagctggggtagggggctgggggagagatagcattaggaaaaatacctaatgtagatgatgggttgatgggtgcagcaaactgccatggcacatgtatacctatgtaacaaacctgcatgttctgcacatgtatctcagaacttaaagtataataaaaaaaattaaagacaaaaacaaaaaactgtagcagcttgtgcaacgtgaagaacaaaggccatttctgcatctcatacctgttggacactgggtgcatttgtgagacactgggcaactcaccaagtgctttcgctttcccactggccttagtagcaggtctctactctcgcttcttgtatatacatggtcttcaactctgtcatttagggaatacaattagaaataaaattctggagtctgcctgcagttatttaagtaggttactaataaacacgtggtaaaattcttttatattttttcattttagtaatgtaatgatagttacattcaaaacacatgcactcatgcaactgtaggtaaacacacacacacatacacagagacacacataagttgagctgtcctattagaaaattttaaaatatataaatatattgtatatatatactatatatagtatacatatagtatatatactatatgtaatatacatactatatatactatataaaatatacagtatatatactatataaaatatacacactatatatactatatattatacatatagtatatactatatatagtatatatattatatataatatatagtatgatgcactatatatgtaatatatagcatatatagtatgtatcttaaaaaaccattttctccatcttatattttaaaaacccttcatattgtattcagctattctacggtgggagaggggcaaaattgaaacaggagtaaccttgtaatttcattaatgggtaggatgtttttcctcattcttgccaattacaaacaataatgttcgcccccctcctgacataggatgtaaaatgccctttgctctcacttaaagacaaaattcagcttttatcaaatcactaaattaacataggaagagttattaaattaaacctgggcggtgcaattaaaacaaactttcacatcatttctctagaggtaaagaaaaaggttacatatgcaaccagagcgttctgctaatccataaagaagtccacagggcccaagtgagttgcagagccatctccaagacagagtgactgctgtgtaaagcagccaaggcccgctgaaagcataagactcatttcctgtatttcaagacaaagcagacacttcacactggatacaagggaattgagatttacggaatttgttgaatatgtctattctataggcatacatcttgtttcatttaatccttataactgccctaacgggtgggcccagctatctccttgataatatgaaaatcaaggttgttaagccagcaaggagcaggaaatattccatcctaggatggcctgattagggacattccaccaaggagattccaattcaagaccctacatgtgctggcagtgtctctcctcagtgtccccatgttgaaccacaataccttttattcctttcattcttgtctagggattggaagactatgaccaaatccagtcactacctattcttgtaaataaagttttattggaacatagccacctccattcatttaaatattgctcatgactgcttttatgctactgctacagagtcaagtatttgtaacagagacctcatagcccacagatactagaacatctggtacctgtattttcaaataaaaagtgtgctggcccctgctctagtcatactgagagtcttctctgccccaagattagaacaggtcctttcttgtccctcaggttctccccacatgctgtcccctttgcctgaagttaacttcgtggtatccttttattggggactctctcatctttcaggactgttttcaaaggacatttccctgaggggtcatcgctcattaaccaggcccaggctttattttttcatggctgccatcctctttaagtgtaatactttatatgttgttagcctagaacagagctccacgtgggtagggatcacatctatgtattcatttgacacaagcagggcccagccgtcctggaatgggtgctcacataataaattgatattctagaagaaatttggcagaaaaagataaactgtagcagagatagtctgacttattctagaaaaacactgttaaaatgagaaaaattcgctctttaaaactaccattacatgtagagatagaactacatagagttaaaaatagatttgtagatatagaacctgtcatgtgaataagctgttgttaaaagagattaaacctttttaataaggtgtaataaggtaaggacaagtagcacccagcattaggttaggttttatttcaaaagttggcttattacaaccccagatgggttttccaccgtcatatctggtggttaaatttcaaactgcccctcaaaaacttcaagactaacaatcttagtagttatgaagcaaggcagacatttaggccataagagaatattctaattcctcccttcctaggtgaaaagcagacaccacaggcattttaacaaacgggtcagaagcgaatcttaccttggtcagcctgtctcaccggactttgtgcacctcccctcacttcctaatcagtcccttccaggccctcattaatgtacgattttatctagcagataggaactcaagaattttacagtttagtagactgattaaagtaagcacatatctaattgtcttagggcagtgcccccaagaaaggtaagaaaaagtgtagtgagggctaacaaacactgttcagcagagcagttaaaagaataggttagattcaaatccaggtacgtgaggatgcatgtgtatgtgtgtgggcatatatatatgaaatatactatttgattaatgtttcagtataactcctccagtgttttcactcagcaatgttttttatgttgcaatcttaaatatcttccctattctttttaaaggttgtatgatattctatgagaaattagacactcttgtgttctctaaacacttcaagcttctgttacgataacccccatggctgttactatacatggctgtgggaactgagctgatcagggctgagaaaatagttctaacagagagactgttttcaatctcagtggtattaagtcaggaactgaatgcacttgaaggactaagaatttgatatgcaattaatatataaaatatgaatatatagttgagtatagaaaggagcattattagtggacataggtggaataagatttagtgcaaagagtttagatcatttttatttttaggcctcagacataaatctgaaatgcttaacagaacagtgtggcaaagaaatacttttcaaaattattcaaagtaatttttagtaatttactcaaagtaaatttggaacatcaaaatttcaatatagtattagattctctacccagaagtccccacatgtgctaattcccaatatcatcagtctgtccctattacaactttgaaatatctatgttattgcattgtgttgtctttatttgtgcatgcctgctgccttaactctgagcttattttgaaggcagaaactgtgtcttattcatttgtatattaccagtatctgacacagtacccaacacaatgtaggtcctaaaaaagtttttggaatgaatgaatgaatcagtggcttcattaaaaacatgtgatccatatgccaatgttaggaagacattttgctttaggatcaagcaaatctggtttttaaattgctctgccatttactagctatgagactttagaggaaataaactctcaaggcccaatttttcacccgtaaaatgggagtgataatatccttatagaagcattgcacagattaaaggaagtaggacatctgtattggttagcttttgatgaataacagatcaccccacttttggtgccttaaaacaataaacatttattatttctcacacatcactgtcagttcatctgagatggtctcgctgacatgtccaataattggcaggctattggctcagataccctggttctcctccacagggcttctctagcaaaagatttcaggctcattctcttggtggtgctggggtccaagggcagtgggagagagcaagcccagatgtgcaaagcacctttcaagcctctacttacatcacatttcctatcgtctcatttgccaaagtaaagtacatgaccaatcccagaatcagtatgggaggggtctacccaagatgcagatagaggttgggcaattattgcagctattttgcaatcaatcaacactcagcatcttaagtgtttagcacagtgtctagaaaataaaaatatttggccgggcatggtggctgacgcctgtaatcccagcactttgggaggccgaggcgggcggatcacgaggtcaggagatcgagaccatcctggctaacacagtgaaaccccatctctactaaaaatacaaaagattagctgggcgcagtggcaggcgcctgtagtcccagctactcaggaggctgaggcagaagaatggcatgaacctgggaggtggagcttgcagtgagccgagatcgtgccactgcactccagcctgggtgacagagcgagactccatctcaaaataaataaataaataaaaacatttaatttaggttagcaataatcatagcacaaccattgttgttattatacaaaaaagcattttctataaagaaaattatcatatatgatcatatatatcatatatgatcatatatatcatatatgatcatatatatcatatatgatcatatataatttccatgatactttcttgagatccttcttagcttctaactgctccatctgtaagtctctgccttatcaggaatctatcactcttctttcacatggaattattactactgacagctgatgatgatacttatatcttgagatggaatctaagtctgggttccctccgaatcagaatttcagcaagagctttgaggcagatggtttattcggaagggaaagctgggaaacaggagacagacagaacaaagtggggaagaaaagacagcccaacataggaatgaattgcctgtgatgttgtgagaaaagcagatgaattgcttcaggatctctgggaagcataaactatgcttctctatactgtctaaccaatagacaggagactgagcattaatcccctggctcccgcctcccctgcgttgaatttgctcatggagcattaagcccttctcacctcactcctgtacttgccagctgtgtttgcctacgggcccaggagactcacaggtcagccctagagcttgatttacagacactacaggggcacactttaggtgggatactttcagtgggaggtgagctggaaatggccaccaaagctgccgctgaaattgaatatgtcccaaggagctataacaggaacacccctagcatcttctgtggatggtaaaaagagagaaaaaataattgcaggacttgcaggtgacagtttcccatcataactccactccacaagtgagcctacactgccctggagggctttcactgccagtgcatttctagcaacattggaaacataaccaggaaaacagtgatgcatggcccatcggaagaggcacaatcatcaataaagctacagtttatttcacagtttgatctgagtggtattgttttatgcaagtctttcttcaaatatcttccaagccactttacattttaaatgttacaaatcctaatacccatgttttgttttgctaatttttttgaatgggtatctttaagaaactatctgtctgtcatataaagaactggccatcaggttattcaaataagcacttaaaactacatggagaagaagagcctgaagttgtatttattctaataagttgatgcttaaggattcagtgtgattttcttttctgctttttagaagcagcagaaacaataaacaattatctcttggcatacccttgatcaagacagccaattacaaatactctgtatttatgttccctgtgtttggtaagacaattttaaatatagacatcattgacattgaaattataccttgtccaattgtcttgcatacacaaggaaccttacaggttgaagaattcactccaactcctcacttagttttttaaaaagaaaagtgaaattggttaaactggtaaaatcaaacagatatcttgacatcagaacacaaagtcaaaggcgaagtttccaggacatcgaagtcacttacatcctctgctcagcttgtagagaatgcagcatgttttatttcctaattaatcacagctcagtcatgtggcacttaagtgcctaccacttgcttggaaaccagtaggaattaagctgggctgggaaggctgtaagatcaagcctttatgattgttctcaggaattaactgataaataatatatgcaacatcccactgattcaaggaacactgagtttgatcttagaaatccactcacagaatttttgtaaacaagtctgatatgattcctgatatattgtatgctttctcatgaattttattgaataaatatgcacacacgggcagtctgattcaggcatatgtgtattatttatttttcaatttgacaaaacgtttatttgaaagtagttttaatgaaagatagatgtgcttttgggttgctcttatgatttgatgtgaaataaaaataatgacattgccttatgtaaatatgattttaacaaagtaaaaaatacttagtttcaaaaatacagtattctgatttcaacagttacattatacacacaaaatctcctgtgatattgatgaaaagaaaagaggcttgagaaagctgaatatgaaattctgcaatgatgcatgatcttatagacaagaacttgatatattggggcatgaacagggatatagttagttctgattaacacgtcagcaagacgccattcatgtagttcctgggctgcaaatgacagaccatttactggggttgtacacaaattgttcaagtgaagaatcagtcaactaaggcatttttaaacagactgtttactggggttatatcaaaattgttcaaatgaagaatcagtcaactaaggcattttaacacacttcgtgtaagcagtattttctagcaagcattactacagaacattgcatggagaaggctttgtgccatgagcagaataagataatatacctggttgtgaaaatataacctcaaatatgtcattgttctttttttgcagaaagagggattacaatttaaaaagtattttatgtgaaaaaaaatacatagatgagctaagaaggacatatgtcatgacactgttcaagtttcaagatgggaatctgaggtctgagcacaatttttccctctcactaaacccttagaagtgaggaaaaatagatgaaagaacttttgaaaaaatatattttcatatttatcgttatccagtatacttttctgtgtgcttaaaataccataataaaattaccaagaaaaaaaaaaaggaaagagaaggtatttcagcaagcaaagaattaatctttgtatttccaggcttcagtagggattgatcctgaccttgttgctctttaacctttcagatgactgtgccatgtctcataaactgtctcagaatcatacctcagctgcaacaaatctccctccacgttgaagcatctgcatatttaaccaatatgctccaattccagtagactgtttatcatgtaattttctgtctcctgtgtctaaaacagaggactcagacaccctgctgtcccatagggaagtccttttactgcttaatttttaatcttcgtatattaaaaaccctctggtgctctttctaggcaaactaaaatcagaagtgcaaggccgtaatccacagaaatctgccagtcctgacaattggggaaaaaagaaaaaacaaaacttcccattttctaatgaaacaggagaattccctaatgccctcgtgggatttgtgacaggggtgcagcatgctcaaacccattaggggagggggagcatgcagacaggcaggtgcaggagccagggagagcacttttgggctccaaggctgtggtagcatccaggggtgtgttacaatttaatgctcttttagcagttcctgtccacagatggataagtgttaaaccagcacagtggagagtcagggtaacagccttttacaccctgccctcttgttacccaggtccttgtccagtgtctgggaagaatcaggtcacacggacttgaaaaatggtgaatgcagggattttatcgagtgattgaggtggctctcagtaggatagatgggaaactggaaagggtatacagagggaagatgatcttcccctggagttcagccatcccatggctgatgtccgctctgactgtcaccagtagaactcctctcgatgtttagacactccatctcttctctgctgctctgctgctcttctgttcctctgctgtggagcttggggtttatatgggtacaggataggggtgtggtgggccagagtggtcttggaaaaggcaacatttgggcgtgaaaacaggaatgcctgtttctagttagggctgcgtgattgcaggcttgaggatggggcctatgctggggaaccaccctcttttacccagtatttccttgcctcctgttcatatcactaattattaacctgtcttttgaataactacaatagaaacacattttaaccattgttactgctgctctagaaagcactttatctcattagggtgagtactcccgaaatgactgaaggagatcttcagcctcagcatgatcagtgctatagctaagtgattctcacttgtggggattgtgctgcgagatgttcagcagcacccctggcttctacccaatagattccagtaggattctcccagttgtaacaaccaaaacgtctccagatttaccaaatacccacgcggtgggagcaaaattgcccccagcttaaagccactggttaaacacaaaaggatttaatgtataaaatgatgtacttaaaatgtgttccaagttatattgaatcaagctccatggaagcttctgaagatacttctcaggacaccacagaaactgaacctccagaaaatagtgggagatcaggacgccaccgacccaactcttagatgacttggggataaggatgtcatagacccaactcctacattcaagaccacctagtctccatcacatttttttcccagtgcaatagataactctctctcttcctttaacatccacaactttagagactgcatgctattcatctttgcctacagtctaatcaccggccaacacaatagctacagtctggcaaaacagctcacctggaattggatctacatgcaaagggcacagcacgtggaacagaataagcccccactcaatagaactgtgtctctacaatagagagacggcacagactaacatcacagatctaaaactttactgatgagatatttcatattctttttttttgtactaaatcttcaaaatctactgtgtattttatagtcagagaacctcttgttaagtagttaacatgttaagtgcccagtagtacatagcatacagaacagcctgggtctaaataagttaaggtcatcattcctaaaagaaaaacttcatgctgtagaaaaagcatagtgtcattagagtagctgtaataataacaatagctaacacgaatatggtacttatgatgtgttctgttctgagcacttcacaggataaactcatttactcttctcaataatgctgcgaggatagcaatattattaacagatgaagattgaaaggcatgggaatgtttgacgcctgtccaaggctacaataagacataaacctcagaacatacttaaaaaatcaggaggacggaagagaatatgaaaggtaaatgtacgaattgcctgagttttgtttttcttgttgtacaaaaggaagaaatgaaagttattttgttctgaagttgttaataatataggattaaaatatgctaattcaggaaatacaagtaacattaaaatgctttcaaaatgctgaaagagatgcatgtgggaaaatgctaattaactgaaaatgaaattaatgctaaataattgcccatgtacaactgaagccatcttaccaccaccaggtataagaatgtcacacactgtgatatgtagcaaaaccttacaggaatagcaagaacacaaaaatcatataaacacactagtggttttaaacatcatcaactattccatccttcacaaatcccaaagatataaaacaaaagttaaatgctgaaattagagtatagcattttaaaaaaggaaacagcaaggaaacatactgagcctactgcagaaataagagcaatgtctcaaacataataaacataataaatagaaatcacatattcattaaaaagactttcataatgaataaaaaaatcaaaatatactacaaaataaaatacataccaaatcaaagtaatgaaaattgttttaaaataaaaggatgatcaataatataccagagaaatagaaaaatattgagattatatagcatcaggcctggtattactgcattataatgtataaagaaataatgtataatgtagctttgcaatgtataaagcagcgcttttaaaacttgcttaattcataggctagtttcataagtttttgttatgccttcatgaaatttaaattgtaatttgctctacaatttctttacattgaattcttttaaattaaatgatacatcttaaacagaagcaatatatcaccatcaaaatacaaaatcattctctattgcaaaaaatagaaggtaactattaaacaaaaactaaaaattggaaatttccctagatgtgctagtgtcactgaaagtctcagaaagaaacagataaaaggagttttgaaaacagactatttacaaaggtttggactggtggggacaagtctaaagttgacaaggaatagtgtgatgctctggaaatagcagccgctggggacagttacccacccttgacaggaaggacacagaacggagagcttttcaggaggcccggctcctagaagctgctgcatttggagaagaaaatgtagccaaccctaagtggcccagagagaaggatccagcaattctcaaatctcttgccattgccctgttcaaacacacttgtctgcctcctgagacagaaagcagaggcaagaataatggagagtagatgggtgtgggcaactagaagattctcaaaacaactctattctacccaatattcttacgaagtcttgctcttctctagtaaaagtatactaataccaccaagttcagattttcttctttcataatgaagacttgaagataaatgaaaaggaaagcactgcctcccaatgttcatgccatgcccatgtacagttgaagccaacttaccaccattcataagaatcccacacaccgagatacgtaacaagaccttccagatacagcacgaacacaaaatcacatgaacatactagcggttgtgaccacaatcataccgttgcatctttcgcaggcacaaagatatgaaacaaaagttaaatatagatgaatctgaagagcatagcccgtaaatgtagattatactttctagacagagaatgcagctacttcttatgtgtatatggggtatttacaaatactgactacaaattagactccaaacaaattcaaaattctgaagaacagaaactagacatatataattgcccataatctctgacagcaatgcaatatacctagaaacacgtaacaaatgaaaaaactgaaacttgactacttagaatttaaaagaaaatattttctactgagtaactcctgaaccacagaaaaaaatcagaagtgcaattgctgaatagttaaaacacaatgatactgaaaactctctgtataaaaaatatggaaagatgccaaagaatttgttcaatagaaaatcagaatcataaatgtttccttgccgaaaacagaaagaatgaaaacagaaaaatagtgttttcaacataaaaaatataaaaaaagaactcaaagagctaaggaaagcagaaaaatagaagagatcaatataaaagcatgaattaatttgttgtaaaagacaaaaagtaaaattgattagtacacgaaataaaaaggaaaatagcatcaatagagaagaatgcatacattggaaaacagaaaaatagaattgaaaaatttataaaataattctttttaaaataagaacaaataattttattataaaaaagaaatacatcggccaggtgcagtggttcacgcctgtaatcccagcactttgggaggctgaggcgggcggatcacgaggtcaggagattgaaaccattctggctaacacagtgaaaccccatctctactaaaaataaaaaaattagacgggtgtggtggcgggcgcctgtagtcccagctactcaggagactgacgcaggagaatggcgtgaacccgggaggcagagcttgcagtgagccgagattgcaccactgcactctagcctgggcgacagagcaagactccgtctcaaaaaaaaaaaaaaaaaagaaagaaagaaaagaaatacatcactgtggaaacttattaggaaaatggaactgattaaaagagtatttaacagaatatttgctcaattctatgctaacaaatttgagaatgtgactagaccattttctataaatataaaagtactatactacaaattggtccaacaaaaaaatagaattcttcaacaaactcaaaaccaaggaagaaattgagaaagttttcaaagatcgaattctcaataaagtttcagaaaatttcatgcatgaattcctacaaatctttaagaaacagataactcatgagctttttaaattgtcctaaagcataaagttagaattaatgctttctaattctttttacaaaaccactgtagcacaaatacctaagcttaacaagaatagcactgaaaacagaacctataaaccaaacccatgaatattgatggaaaaatcacaaaatatcaacaaatagaatccacataacattttaaaaataagttttagttcagatattcaagaataatctaacattagaaaaatatcattttcattcagcatataaatcagcagaaaagtaataaaatgatcatatcaataaggccaaaaacacatatatgatagaattgagcattcaatcatatatttagtaatatctatgtcatttattataaagtagatgtagctgctaaaatttaacatgtgatatataaataacatttcataaatgaatgaatcacaataatttgttcctgtagctacagctttcaatctgaatagaaaagagtcacttcctcctgaacagaaaatagtagcctggatagaaaagcacatatgtcaaaattttgcaaacacaggcacaaatagggctcacccaggtattagctaggtaattatgtccaattatataatctattcaagactcaaagttttgtaacatgagggcaataaaacacatcttgacaggttattttcaggattgtaaaaagtgcagaacacttagtacaaagtaggtgctcaactaatgctctcttcattgcctttgttgctagctgtggtaaaataatttgcacaatttgcatttgaatccaagcttacaaaataaatattttcttataaaatctctacccctctaccacatccatttagggagaagacataacaggtcaaaaatatttttccattataaaatcattcttatgtgaaaaaatgtataaaatgaaaatgcacaatatagaattaaagtttctcatagttaattctctgtcataggcttcattatatttggcatgtattcctctatgcttgggatcttagttggggctgtaccctttaaatacatttttaaaacaaaattgtaaagtcttcagaaaaatacttaatttgacaacttcatttcacacattgctttacagttacttatatattttacaagacccaaactggctgtgtctttgatctgatccaaagtcatatagtatataatataatccgtcagtatttaaaatcctaagtcattggtcaaatatggaaatgtttcaagagattatgactgtgccaaccttatcccttctcatcatgtaaacaaacaaatcagttggaagtggatgggtcttagcggtagctcagtcataaccattttcaaatatgaaggaccagaaatacaaatagttggaacagaatcccatcagatgacatgcaggtatgcttaattatttgtctatataacaaaaaattttaaatttgcccagttttccacttaatttcatcaacatagataactatatattggaggttcctcagtggcaagtaatagaaagaaatcattgtctcatcttgaactatctcgttgaactatctacaattgatgagtttaaccatgtaattgacaatattccaatctccactgggctaatgaaaacctcagcacactgataatacctcaaagttttttcctgttcaagtttttaatgttgcttgtggttaaggttcatcacaattaaataccagattattgcctaaaaagcttattgttgttcttgtttagctgtctaatttccttttgttaatatgctcttaaagctgttacaaaatactttttccaagctaatttgggaaagacattttacaaagagcaggtaattttaaaagcatcattctaaagttgatctttcattatttctctaaaaaacaacataattggtaggatcaaggccacctacagatcagtctttaggcaaatcttgtatattcaaggtataaaacttctccctgagcccagtctcattatctaatgggaaagtgctgagaaagataaaagttatgagattattttttcccttgctttctgccccacctccctactttcataaaacatcttttatcaggccatgtcctggaaaatcagacataattgcagtaaccttaacaagtaaagggaggaatctgtcatatcctatttttatcaactttgttttgaaagctttcgatgtgtagcttcttctattaaatgacttaatgcatatgtgctctgcaagaggagattaagccatgtgtatgctgtctgctgtatctaggggtgtcatttggagaatcaacttcaattaaatctaattacattccccttcaactagagaggcatgaaaaggacccataaacttaattttaattgtaagtcaattacattgtgaagacgcagaaaaaatattaaatgagtatgacagagtcatcctgcatggatactatactctcagacctcatgtaaagagaattactaggagtgaatttaaataaaaatccttattcaaatgttacccaaaatattgtacccatttttttttgaactaatacccatatttccaatgggaatgcaatctaatgtggaaagatgtcattgttcattgggaatgaagaatgaaaattccgtgcattcaggtcattcaagggaagagacagacaggaattctttaaaactcagacaaccagcctgctctgtaatcatggccaaaaacaacaaagttgtaatttttatacatacctttcaattggttaatagacttttggaaaataatgctcataatttcagaggaacttgatgttgccattggccaggcccaacttacagaacctctcctgcaactaaaggtgccactcaaagtacatagaccaagaaccagggcagggtgcccctacaggaatatggcacatcgtgaacagaagcaaggtgaatggatactaagtagcaccaacaatagatttccatgatcacaggcattctaaaattatttctttgattaagacatattggtggcaactttagttactgtgctatattgcctatcctctcttcaaggcactttaatgaaactggtttattttatgagattaaatgaaacactcttctagaaatagtcctcatcttcattgtgaaggtattattcaggactttttttcatatattccacactgttctttttctttcttttttagaatccatgtgagaaatttttatctgttcttagcatcaggaatagttatgactcctctgagaaatatgttcaagtttcattttctagaatcctgggacttgtgtaactaatcatgtttccctaatgttttcctatttttaactctctgagaatactagcacccttagcaagtaaatgtacgggaaacttatgtatgctttttacaaaattgttgttattacacagacttatttactcaacttacagtttgaattagttcagtgcattttatgttttcttataagatatacaatttgtttagtcaaatgagcaaagatatgaaatcatatctttgaaatcatgtcttatgggaatcaagctagtaatggaaatgggtcaagcatctcacatgggaagggcatctggttctctttctaatgacacactggttcctctgatccagccaattagtgtcacattgaggattgagacccatatggccagatctttaagaaaaggcaaaactgcatcctaaacccatgttgccttcaaagatagatggtggataatacagaactatatgatcttccttaagttaatatatttttgtcttcattaaaagcataagaaatgagaaacattttatttattaaagcagtaaagaaaatgatggaaagggtatttgttagctcatggagtgactgaagagtccacagtgcctggttgggaaaatgggcaagaaccagggatttgcgtctgagcacaaacttgactgcaggaatgggaagccctagttctgccgctctggacattcatcaacatgctgctggatcggctgccaccagcactctgcacactggattgtctccaccttggagactgtgtccacctttgacatgaatcccaaatgcaccctgcctctttcgggagcattcagtagactaagcttaactgcatgtttaaggcaaagctgccagaaattggtgagaacctgtacctgagctttgatccttcattgtaggaaggttttctaaacataggacagggattcatagatgtggtatgcataagcagaagggcaaatctccaccataggacccaagagcaatatccatctaacagttttttgaaatgaacaacaaacaacctattttatgctaagcaatattttttttcgtctaaaacatccagttgactattcttttaataaataggagatgagaacagttttatctttgggactagtagttattatccattagtgttagggctctatctttgaaagttatgtggcattattaaataataatattccccttgttagggtgattaaacaaacatttaatgatctctctgtgagagataaaaataaaaatacctagatgacaaagcaaaagcctttcaaatacccttagaagaaaccaaccccaaggcccttgtgacagcctccacatgctatcaaaaaccagtagctcaatcttattaagttagactcacctggaaaggttaaaagttttaaagtatagattcccaagacatcccagagattcaaacataaccctcctgggttggagcccagtcttggtatttgttaaatgtttttccaggtattttcagcactgagatcagcactgttctgatcccgagaagaaggaactggtaccatagataaagggaaaaaaagggaaaggaaacttttctatttgagaagaccacaagtagtcacctttataaaaacatttatcccactggcatattattagagccattaatttgcatgaaggatgagatgagaaaaaagtttatataatttccagaggattgtagtactattgagtgctgatataataatgatgatgatgataataattgtgagctcaacaggagaaagtacagtgaccgactcccaaggccggccatgggtgcaggtagagcgatttaccacgtacgccaggtatttgccatccttaaagtgtttccttcacaacagttcatcctactcagtacgtgtgatctccgattaaaactattgatccacttgactagctctgacatagcagagaatctggctctgcgaggagacaagaaacaggtgaattatttgcaaagtagaaagagaactaaagcagtggcaacaagtcaagacaatgagaccaaactggactagtagctgctgtattcctcccctccaagcacttggcagttaattatatacacagtcagcccttcttatccacagttctgcatctgcatctggagatttaaccaactgcaggtggaaaacacagtgatggtgggatgcagaatctatggataaggaaggtggactttttgtatccatgggttccacagggctgaccactggacttgagcatcctcagatttacgtattgttggggatcctggaaccaatgtgtgtatatgtgtgatatggttaaaatacgtatttagttttcatccccatttcctgataatatagcttctaaaacgcttggaatctctggagtgatgtcttctgtataccaatgagctgactggcaactggcagtccctgggcatcttcaggtagagccggtagcaagaaacaccaaggcaggattaaaggattggggctttcagacccaccacaaccttcagggatgggagggggatgaaagctaagttgattgccaactatccaatcagtcattcctacttaatgaagtttccatacccaacccctcaacctgaaacacacacacacacacacacacacacacaaacaaaacaaaaaaacacacagggtttggggagttcatggatagtggaacacacagaggttccctgagtgcagtgcactcagagagggcatggaagctccaagccccttcccacacgcctcgccctatgcatctcttccgtctggttcttcatctgtatcctttgtaatatcctttataataaacttgtagaggtaattctgagtgtgtccctgagttctgtgagctgctgcagtaaatgaatcaaacccaaggaggcagttgtgggaagcctgatgtatagccaattgttcagaagcacaggtgaaacaaccttgggcttgtaattggcatgggaagtttgggggcagtcttcaacctgtggtatccaatgctatcttcagtagatagtgtcagagctgaattgaattagaaaacacccaactgatgtctgctggagaatctgtggaattgcttgcttggtggcgagaaatccccgcactttggtgattaaaagtcacagaaacatttgtgttatgttgagtataaagtagagtaggagaaactatttgtttattcctatattacagtgtgaatttaatttgtatgtcattaatataagtagatatacatggctcattaggtaaagagcaagtgttcatttgagaacatatatattcaactaatgagtaagttcaaggaaatatatgtgcttgaatgaaaactggatctttacccaatatataaaatgtataatattagataaccagttctactcaagtatccttgatgaagcaataaatattattaatgttattaactcttgacccttacatacattgcgttttagtgttccgtttggtgaaatgggaagttcccataaagcacaccaaagtgctatcacatatcaaggaaagggacgtgcagggaaaatgagcctgtttttacctggaatgccatttttaactataatatatggtaggcaaactatggttactcaaacttgtgtagtatgaaggtgtatttttgaaagtgaatgaaaggagttatcactttaaggggaaaaacaaacaatatttgccaccagtgataaaatttggactttcaagtgaacaatagcatttttaagttctatgtgccaccatgagcctggcaacttcccaatacttaggatacttttctgctgagatatctggtaacattaatgaatgtgagttttttgtatatttgagaatgaattagatcaacatttggaaaaatgtatgatgcagtgaaccagtagtccccaaatgatcaatgtgagatgccacgcatgggaaaaggacccattcatagtggaagatagaccaaatggattttgctgtcctaaagtacaaacgcattgatataattttagatttatcacctagcaactaatgtataactactcacctcttgtcgaatttcaccgtgctatcaaaggaaagtaccaacaatgaatctaaagagacttcaaattctccctcccagtggcatgtcatggtcactttgcaaagacagccccaggagaaatagaaggaagcagaagaaaagggagagtagagtaccctgaagacaaactgactagctccacctttttaccaagagaagggccctgtgataatgggaagtgtctgtgagtgcacttttaaatcttgtacgcttttaccttaccttagacccagtcctattctcacctatattaatttcattttttcctttaactcatctttcctttacatgtgtttgaaaagcaagctttatctcagtaatgcaaatgaaacaccaaaaatttctcttaagtggaactgaactctcaaatcaatgcacataattaagacaaatttatctttcagtctatccatatgacacccaaaatcattggcattctatcagcgttgtgtccattgttttccaagtgtcttcctcagcttcattttaatatctcatatgttgttcaaaaattaatgaaaatcttcaatgcggaaattctttgaacactaagaaattttcattacagtctttggtgaatgtgttgatcttggagtaagattaagtgagaataactagccaaaccagtcacctctccctgactatatcctctcccactgtaatctattctccaccgcagccagacttgtctctctggaaattttgtactgtgatgttaatgctctgcttatagttctcttccttaaactcattattaagttcatttctaactcaggacgcttgcacatgctgttttctctgcctggaaagctattcccagagatctttaatggctggttcctctttataaatgctatcttgacaacctccccatccccctacccccagtctcaggaattacccctttccagaatgcagtaactgtggcaccaatcaatatatgaaattatcttatttgtgtacttattttctctgcctctagcattaggtttcactcatcacttatggaagactaattgcaaaaatggccttgattattccccttcctgtatctttaccccttacaacgtggctttgtacctcatcttagaagaggtaaagtctagtccctcagccctgaaatctagactggctttttatttgctttagctaatagaatgcataagaactgatagtaggtgacttctgagcataggttcaagtactttccccttcctctttagtactctagctttactaggagataaaactctggctaacctgaggacggaagaccataggagagagtctagttgtcctaggaggggccatcctagacccatcaacagccaactaaccccccaaacaagcgagagggcccagccaagattagctcaactgtgtaccctatctgtaccagagtgcagattggtgagtgtgcccagatgagaacagcgggcaacctaggtgtcccataggctgatgagcagtaatagatgcttattgttctagatagttttttgctattgttgataattattcacagaattaatgtgtcaatagataacagattcaccactctatctcaagaaccttgagtagtgcttggcacatagaaaaatattttgattaaaaaaaagttagtggatgtttgaaagaatgaagaactaaaacgtaacttctttatatactagtccagttacattttcccaacgtgttctagaactaacctaaacaatattaagaagtttgctcatgcagttaattcagttcttctgggcatccacaccaattactagaaaagacaaaaaaatacaacattagaatagatattgctactaaataaaaggtattcaaatatttatatctactctctctgcagtctataaatacacccgtccagacaagctttattggtgttagatgaagtagactgcagctcagagacaaccgttgttttctacttccctttgagccactgctggctcatacagaatgaagattttcctgttttgtttctgcctaatcatttattgtaatgccgaagggaagaaaataaatcttggacactttgaccaaatcagtttagtttttccattatcacagcaagagaggaaagtactgggttttcatttttaaggataatctttcttaaagtgtgtgcaataacaagctaggttgaaatgatattagagacatttgaaatgtttttaaagggattcagggctacactggtttctggctttagtcagaagtaagtttgttgccccctttcattttctctggacagttgcaaaggaattaagtactcttatagatagatgccattgaccaattcagagaaatgcctggcttggaacttttccaaatgaagttaccatttaaagattcttccttgtatttgggggaaaaaaatgttaaatgcaattattgtttgttttgaatgtaattattgttttaattaatttcaattcataaggcactatcaatgtaattagaacgttggactttgaaattaattgaatatttatacagaaatgagttttgtgtttgtgccagcaatcttcacctacctatccatgtgccaaaaattgttttctttcctctttcctctctcccttcctcactcagtcgttggtttcctcctccttttcttcctgcctgcctccttttgtgcactgtctccactcttcctttccttcattctttcctttctctctgctttttatttcttccttccttttcctctttctatactcccttccttttctgtccccttccttccttctctcttgccttctttctttctttcttgtctctccctcttctcatctttactccctccgtctccccgtcttgctccaccttccccacctcaccttccagcctctcagtagccacttggtgatggtagggaggatgaaaaggtattccttgttttaccacatttactcagataattcacagcatgggtccagcatgtctaatttattctttttttatgagctgaatataatctttgagaaatagaaaaatagattgagtgtggccaaggatcattcaacttctaacattctcaaatgtagactgaattatgtcttctgtttgttagaattaaggaaaaaaattcatgtttcgagtaccttttctgttaatctactttcacattttacatatttagcagttttaggctaattaacaacagggttgtgtatatgtaattttgaagttgtaattctgaaacatattaggacttatctttgttaattataaaatttcagctggatgctagacactgtcatttaatcaatttgcgatgtatactttgtattggtatccacttatattaaggcaagtgttttaagtaaatcggtatactagttcaatttgacttcagtttcatcaattttatcagttgattgataatctgatttaatcaatgtcttctttcttctgtataactcacctcaggatttagaactagctttgttattggaagtccaaaattaatctacatttcaataagagaatgagaaagagcctggttaggatacttgttaaagtgggcttgaaattaaaatgactaaactcaaagcaattataacctcactaataaggtttaaaaatcactgtgaatattaacccaatgtggacgtgaatcttataaaatatttacacttatgcattactatgaagagttgatttttgatctgttgtaagctaatttgataaattttacaaccatagaaatgttcaaaaacttaatggtttatcataagaaaataagaaacatttctatcccaaaaaattagaaaaatgcctgggcatgacaacattcatagtggtgttgtttataatagtagacattgaaatgaacacgaatgccctacaataagagaatgaccaaataaattgtagtaacatgaaattgatgaaattacatataaccaataaaaataatgatgactatgcaggaacatagaacattcctataacaaacttttgtgttatttgtgttatcattaaatttatatgaggatcatagaaccataactatttattcagtatgtactcactgaaaatgcattgcaccctgtgctaaaagcagcagacataaaactgacagataaaactgagggagatatgacccctgccctctgcatttgacagaccaagaggagcatccccaacttcccacttaggagctgtgcatacttaatctctttcagtctgtttctttctcctctgcaaaatgggtatgagatgagtaaccacctctacagggcatctttgagtatttaattgatattatgtgtatttgtttaatccattgcttggtgtgttagtttgctagtttgtgttagtactttgttaaccttaacaaactactataaactgagtggcttacacaacaggaatttattgtctcatagtcctggtagctaaacatcttcagatccaagcgctagtggagttgggtacttctgagggctgtgagggagaatctgtttcacgtacctcccgtggctctggtaatttgctagcaatctttgacgtttcttggcttgtagaagcgtcaccccaatctctcccttcatctttttttcttttttttattattattaaagttttagggtacatgtgcacaatgtgcaggttagttacatatgtatacatgtgccatgctggtgtgctgcagccactaactcgtcatttagcattaggtatatctcctaatgttatccctcccccctccccccaccccacagcagtccccagagtgtgatgttccccttcctatgtccatgtgttctcattgttcaattcccacctatgagtgagaacttgcggtgtttggttttttgtccttgcgatagtttactgagaatgatgatttccaatttcatccatgtccctacaaaggacatgaactcatcaatttttatggctgcatagtattcccttcatcttctcatgacattctctctgtgcacatgtctgtcttcaaatttcccctttttataatgacacctgtcagattggattggggccaactttaatgacctccttttaactatattacctctgtacagaccctatgtcccaagaaggtcacattctgaggtactgaaggttaggaccccaacacaggaattttggggagacacgaattaatccataatactttgtatggcataagctttcaataaatgttagctactattattaccaatattgttaagactaatagtcatatgacattataatggtgtatgtggcaagacctgacatgctaaccaaataagaagaaaacagttgattagttggacgataagagtctaagttatcaagtgtctttttaaatttttcttttcttatcatttttataatgcccacccatccccctggagtttgcactatttggagaggggaaaaaatctggactgtctcttaaatataagcaactgccattcatccataaataccatttcactcacttcccactgactcccactctcaaatagaaacatccataaaaaagtccagctcacttttggagaatgaaaaagacccccttttactctattttgtattctgtcttgtcttaattatcgcatgaaacagcagcctttttaccttcgtgttccttcctagtattttatttcaatatttatgcttttcttctccagaaaagaaagcattgttttctaatttctctcatctctcctgactgctgtgtagtgattatgacatatggattaccacctatagattctttatagcaagaaggtcctcgggccaagtgacaaaatctttgactttattagagtcattcttttctctcgcagtctttttaaatatttattttccttcaggtactttggctgttggatttctttcttcctagtatgtcacaacccttggcttaaaaactcaatgttttattttcaaaataaaaatatattgaattgtgcagttttcagattaagggaaagaaagataaaagtaagcattaacttggagtatttgagccatttataaaaatttatttcatggattcagctaaaatttaatacataagtccacatgaagaattgtgtctacaaaaaatatttaaagagaagatgtcaggtcatgtaacagaaaagtccaagatgtatctcttcaggtgaggctagatccagcaacttgagtcatgctacagatgatttttctccttatccctctgttcttttttcaaatactgactacatcctcagacagagacctagtaggaaatctcaggacatcgcctcgtagttactaaacagtagctgtaggttcaaagctctcatcctccttccacacacccaagagaattagaatgagtcactgatttgattcttcagaaaagagaggtagtgtctccttcttaaatgtttcctcacaggtcattggcattgatgctgcttgacttatgcatccagctctgaaaggctatgaacaaaatgacattagcatcccgtgtgagccacaggactgagaaagaaaggtcccttcacaaagaaaattcagggtgctgttcttagaaggaaagggaatggggcattgctgccaaatagaaaacaacagatgtccacctccagaatatatttaatagtggaaacaattatttttaatgatcatagccttgtattttatagaaaggtgctctataccttgcccgaggtggtcaacagacaagtttgttttatatacttctttaagtcaagatttcaaatgtagggttctgtacagtccatgaggcaatgactccttctcctagaaagtgttcttttcatacctcacttaagagggtttcacagaaggggccctgcgaagccagtttgtgttgcttgatcccattaccctgttcgtgggtgattgaaccaggggtaagctgctgacctaaagtgagccatcagattctccatcctatgcatttggaaatggtggtggggatgggaaaaaataggaaaaaaaaaagctacctaataaagaacttatcccatttataataaacagaagcatactccaataaaaatataggcaagcaaaataaatgggaaattcacaaaacataaaaaaagtttgtgttagcaaggttcgaccagaaaaaatagaaatagtaagagcaacatattgagagatttactgcaaggactcagcttgggcaactgtgacgtccggctgggtaggcctagaatctggggagcaagttttcaggaagctgagactctaacacatgggctgagactctgtcctcaggcagaatttctttttcagggagcctgagctccttctcttgaaatctttcatgtgattggatcaggcccaatcagcttatctatgataatatctcttacttaaaatcaactgattatggacttttatcatatctacaaagtaccttcccagcaacacttagccaactatttgattgaataactaggaactgtggcctcgccatgatgttgatacatcaaattgtccatcatgacattcaatcacactaataatctaggaagggaatactaaagtcacaagcatattacttttacctaataaattaaaaattgtcttaaaatactaagacttggtgttactatgaaagaaaagcaaaagatacatctactggagaccataagttgtaagctgtctttctagcaatgtggcataatatctcagggacaccaacattttaaaaagaaatttaatgtgaaagaaaatagagcataaaataagtaaattattatttaaccataagatggaatgtcagataactattaaacattgagttaaaggacaatatttcatggcataaataaagttcttgatatattaaagtaggtatattaaagagatagttgataaatatcatagacattcagttttgtacagtaataaaaagggtagaagtatataaatcaaactataagagtaactctaggtaatgggtaattttttttttttcttgagacagagtctcactctgtcgtccaggctggagtacagtggtccgatctcagctcagtgcaaccttcacctcccaggttcaagcaattctcctgcctcaacctcctgagtagctgggattacaggcacccgccactgcgcccggctaatttttgtatttttagtagagacgaggtttcaccatcttggtcaagctggtctcgaactcctgaccgtctgatccacctgccttggcctcccaaagtgctgggattacaggcatgagcctccgtgcccggcaggtaatgggtaaatttttatttgtggcttttagcaatttctaattcttacaataaacaagctcttgttgtgaaattagttacagttggggtttgttataatattgaggagttaaataatgccaccatatagagaatcttgaatataaagtgcatttggaggttcacatacattcgtgtacttaatcactgcaccgttaactcactcaacaaatacattctaaccttttattctatgatagtcactgttttaggcaatggaaataaaatagtgagcaaagcaaactcaggcccttctgtcatggagcttagcaggtaagagagaaaataaagaatcagataaatacatttgtagttgcattctataacaagcgcactgaaggaaagagacagttttctgaatgtactagtatttatattaaaattttaaattattatataatgaaaatatgtagtgtgtgttcgtttggtatgcttgtgcacgtgcgtgctgtgtgttgtgtgctgtcaccagcatcaacatctcaaattagcacttggagaatgagattccaggaaaaaatatccagaaatgcctaaaattgctaaaactctgcaaaagaaatattgaaaaaaaaaatgcaccattgcataatgaatcctgagtaattggctgaagctctgaatgacacacccacatacattgacagttttccactgggctcatatcattcatccattttccctcagaatctgaaagataaatctgacaagctctggataaacactggctaagactctatagtttctgggtatggagaggtgacatgacttattctctgttatcatcgggtctcctgttaggcagcttcagcaaagactctggatagatcaacatgtcaggctggaggcttagtgataattcagactgcggttgagttgaagcgactgctcaggcaatcaggagaatatagcaatgcatagttccttccaaactacaagaaaactgagaagagaaatagaattttgaactctttggtataatgaataagatcacaaaactggaaactcgcctactaaattaagccaattattttgttcccccctagatgagatcaaataatggtcctcatggaggtgtcagaaataggattgcaaagaagagtccatacacaatcaggaaaaatagatcttgtgttaagatatcttggcatgcatgactatggtgattgcttcctcatttcctccaagatgcattttgagtgaattattcctcctcatatagttgtagcacagggagagatcatattcttagaatgagaaagggactaggtttagataccaactatgactttttgccagtgaagacccatctgtccgctattgatttaataactgagcaaagtttcagtaacttggtgaaattttcatttgctatctgcattaggtggaattctgaaatggcccccaaattctccttggatgtggatgccttagtatcagaccttccttctccttgagtgtgagtgggcctgccctaagcaggtgagccctttaaagaggctctagggtcagagacagaagttagagagatttgagacagcagaatatattctcctgctggtgctgaataagagaactaccatgctgtggagtgaatcatgtggtagggaacatggaaaactaagggtcagccctaaaactgcaatgaattgaattcagccaacaaccagtgagcttggaagagggctcctggcctcagatgaaatcacagccctggctgacacctgaatgcagaactgtgagaccctgcacgaagaaaccagctaaaacatgccagaaaactgcaagataataactttgttttgtttcttaattgtactttaagttctggggtacatgtgcagaatgtgcaggtttgttacataagtatacatgtgccatggtggtttgctgtgcccatcaatctgtcacctacattagtatttctcctaatgctatccctgccctagccccccatcccctgacaggccccggtgtgatattcccctccctgtgtccatgtgttcttattgttcaactcccacttatgagtgagaacatgtggtggttggttttctgtttttgtgttagtttgctgagaatgatggtttccagcttcatccatgtccctgcaaagaacataaactcatccttttccatggctgcatagtattctatggtgtatatgtgctacgttttctttatccagtctatccttgatgggcatttgggttggttccaagtctttgctattgtgaacagtgccacagtaaacatacgtgtgcatgtgtctttatagtagaaagatttataatcctttgggtatatacccagcaatggaattgttgggtcaaatggtatttctaattctagatccttgaggaattgccaaactgtcttccataatggttgaactaatttacactttgtaggccgggcacggtggctcacacctgtaatcccagcactttgggaggccaaggcgggtggatcacaaggtcaggagttcgagaccatcccagccaacatgacgaaaccctgtctctactaaaaatataaaaattagccgggcgtggtggcgggcgcctgtaattccagccattcgggaggctgaggcaggagaattgcttgaacccaggaggcagaggttgcactgagctgcaatcatgccattgcactccagcctgggcgacaagagcaacactccgtctcaaaaaaaatgtatatatatatatacacactgtgtaaaagtgtccctatttctccacatcctctctagcatttgttgtttcctgacttaatgattgccattctaactggcgtgagatggtatctcattgtggttttgacttccatttctctaatgaccagtgaggatgagctttttttcatatgtttgttggctgcataaatgtcttcttttgagaagtgtctgttcatgtcctttgcccactttttgatggagttgtttttttttttcttgtaaatttaagttctttgtggattctggatgttagccctttgtcagatgagtagattgcaacaattttctcccattctgtaggttgcctgttcactctgatggtagtttcttttgctgtgcagacgctacagtaccattcaggacataggcatgggcaaagacttcgtgactaaaccaccaaaagcaatggcaacaaaagccaaaatagataaatgggatctaactttgtgttgctgagttacattatgagctaagtatgtgagattgcttatgcagaaatagaaacctaacaacactatctatgcttcctttctgtttttttaaaattcagttaaatgaattatttgttcctccatggtcaaaactctaatcatgatgtgtccagagactgcagatttcagtacaacataaatgcaaaaatcatccccagtgatctgttttaaaaatttaacactaatattcacactgagataatttctttggcttgaatctcataaatacaaactaaaaatattacagaagttagcatctagaacttggtatctgagtaacaaataatattaaagataactcatgtattcattgcttgttctttgccattcattgtacttttttcttcactacattttctcatttaatcctcccccaaaaacgataaagatggggagatactgtataataatttatgggtgaaaaaactaaaatttagataatagttaagtaacttgccaagggacacacatggctgtaagtagtagaggccagatcgaaattccccattcagctgctgtgccagcactgtatatgaaacgcaggctttgtcttttagcctcctgtaaccaaccttttaccctggaaagtgactacactacactacaaaaaaaaaaaaaaaaaaaaaaaaaaaaaaaaaacagggttttttaaaaatatctatatattcagaatatataaaaataaattgtgaaaatgtaaccatttattttatttattcagaatgggtattgagtcctatacgtaccaggaactgcacactgtcacagcaaatgccttttgcctgactaaacagatgttgacaattcttcctttttgttttttcctccatgccttctttactaggatctagatctctggtctcatgaaatggttatgcttatattatcactttgttacatgtttacttagttacaattttaaaaaaaaaagaaaacccccagctggtctgggaatttgcaactagagaggtgcctgatcctctctcttcttagtctgcctggcctccagcggttccgctgctgggctcagacttattttaattccctagtttcctactgagtcagagtcaggcgctatatcacttttcagcgtcaataacgcaggtctaattttcctaagttgatgagggtctgatagatctgatgaccttttgttggaatgtcatttacaagtatgattaaattattctccatggctgaattgacacctacagctgatgtatcttcctccagaggcagcagaaaaatctgcttcaccctctcatgcgcggcagagatcttttgtaggcagattacagattttcagctttgagtttgaaaaggtgaccctggtgatgatgactttttttttcaaatgtgttttagctgataccatttctctccaaaccgattaactatatctctatagctatacctaaaaaggctatttatttaatctgttaggagaaatagaaaaaaaagaaaggatgccagtcaaatttcttgaactacatcttcctgggaagtaagaaaagtgacattttggagcactgtctatttgctatgttaaacattgtatttttgttacttatttaattttgacaataacatatgaagtataatatttgcattaaacttatattttgagcctactgtgtgtcaaacatggctcaaataactagagatacagtgaattctgccctcatcgagcttaactgcatatgaggaaactgaggcaaaggaagattaagtaggctccctgcgtgcacagctcgtgcctagaatatggtatgtgttcaataagtgttgaatgtataaaacggaatcaaggatgacccaggtctgcctgcctctacaacccaagctttgttctctagcatataagaaaaagagatgagcataagaaattcataaagtaaaaatattccatgggaaagatgaggcttcagagtttgctgtgagctgctagtcttgacctctgactgcacctcttgtgttactttgccgccatgcacagagctaagcttactgctacatgtgttgtcaatagatggtggctcataggccaaattcagcccactgcctgtttttgtaaataaagtttcattggaacatagctaagctcatttgtttacctattgtctacagctgcttttgtgctattttgagtcattgtgacagagactgtatgatctatgaagcctaatgtatttactatctggtcctttacagaaatgtttgcagacttctgtaggaacttgtcaaaataatcctaacaatcctaaaagacagatactattactatccctgttttatgaatgtgagaagtcatacagttagtagataattgtgtcagtattggagaccataaacaaatataaagtgtttttaatgaattattacaccacctcctccacacagatgccttctgggagatgagagtgagcgtgtctaaaatggtcgtggattggagaggatgtgtcttagctactggggcttccagagttttgagcactgacaacttctctctctcagctctaatccctcagtgtatagcctgtgggttggctcaggttcttgacttcaccagcgaaagaatttgagagtgagtccaaagtaaaggtaagcaagagacttgattgcacagcaaaagtgcactctgccagctgatcagagcaggccgctcaaaagtgaaacagcaccgactgacactggggaagccaccttatgggagtctgactgacatggttattcataaaagggtgatgctgctaagcatgttctgggctgtctcctggtggcacatgcgctgtggttgagcatgctggtacatatgtcacatgtctcattagcatcataaatccccacccagatgtgggttcttcactattataatgagcacaggtcagcccaaggacactaatcatgggtttctgcacttgcatgaatttgaggattttcccttctgctcttcttcctcctttctggaggatgttctaatcacgagctcaggatacggctcctgtcctgttgggtggcttgttctctccatccatttagcaagtctgttcacctttaagggaggctacgaccacaccccctaacccacctccggtgtagctgtgaagccctgtgctgagacttacgaacttccttcaactccatttttatggtggtgatcatggcatctcatgctacatattcccttccaaatgatgacgtcatcatcgattgaaaaagaaacccagaaccttcagaagcagacaattttttggttgccctcaattattggactatctataagagattttcttttgccttaaggtaaaggtggtatcgccattttccacataatcaaaaacgtttccatgtttaatttttattataaattgaaattttacaatgatactgagttttttatatctatatcttctttcatggtgcctaaacgttttccttgaaatctataaaaattttcaaattgtcttccaataataaataccatttggtaacctttacaaatatataaggctattacaactcagctccagctaatgattgacatttagacgtgtaagcccaatatagccagagcttctgtatttaaaaaaaaaaaacaaactcaaatttgctacacattttgagtcatacaaaatttgactgcaggcagattcagcttgatggtcaccaggttgttttcaccacagtctgctaaactgcatccccacacagcccaggactgcataactgaactcacagctcccaaatctgaatgcacaaataaactattgaatttggtgcaaaaagaatttaaatgcccacttaaaataacgtatttcttataattttcaagaaataagaaataaattaactttagtaacactcagtaatgcagagagacactgacacccctcacttgggtccataaacctgatgctgctgtgtcccctaagatttgctggagaaagactgcaggttccaatggagagatgccagggtaggctagatgcataatgcaacttactgaaaatcacgaatgaccaggtgagtgagtttttgaacaataatgtataatttcaactaagtgaacccctccccagatggacaagtagcataaaaaatatttattcaaaggactataaactgaagataatgctaaggacacaaaaacacaagcatagaaagataatggaaaacgtggcctttacacaactcctatttcaattgcttggtaagcaatatagtaagataagaagaacagcgatctaaaaagaactagccaattatcgcagcaccatttgttgaaaagggtgtcctttccccactttttttgctttgtcaaaaatcagttggctgtaagtatttgggtttatatctgggttctctatgctgttccattgttctatgtgcctatttttataccagtaccatgctgttttggtgactatggccttatagtatagtttgaaatcaggtagtgtgatgcctccagatttgttatttttgcttagtcttgctttggctatgccagctattttttgttgcatatgaattttagaatttttttttctaattctgtgtagaatgatggtgccatttcaatggggattgcgttgaatttatagattgcttttggcagtgtggtcattttcacaataatgattctacccatccattagcatggaatgtgtttccatttgtttgtgtagtctatgatttctttcagcagtgttttgtagtttttcttgtagaggtctttcacctccttagttaggtatattcctaagtattttatgtttcttcttcagctattgtgaaaggggttgagttcttggtttgattccccacttggtcgctgttggtgtatagaagagctactgatttgtgtacatgaatcgtgcatccagaaactttgctgaattcttttatcagttttaggagctttctggaggagtctttagggttttcgaggtaaatgatcgtatcctcagcaaacagtgagtctgacttcctctttactgatttggataccctttctttctttctcgtctgattggtctggctagtacttccagtattatgttgaaaaggagtggtgagaatgggcattcttgtctagttccagttctcagagggaatgctttcagcttttccctattcagtattatgttggctgtgggtttgtcatagatggcttttgttacattgaggtatgtcctttgtatgccaattttgctgagagttttaatcataaagcgatgctggattttctcgaatgctttttctgcatctattgagactatcatgtgatttttgtttttaagtctgtttatctggtgtatcacatttattgacttgcgtatgttaaaccatccctgcatccctgttatgaaactcacttgatcggggtggattatctttttgatatgtgattggatttggttagctagtattttgttaaggattttagcatctatattcatcagggatattggtctctagttttcttttttggttatgtccttcctttctttgttttggtattagggtgatactggcttcatagaatgtattagggagggttccctctttctctagcttgtggaatagcatcaaaagtattggtaccaattcttctttgaatgtctggtagaattctgcttgcacatgcatgtttacagcagcacaattcgcaattgcaaaattgtggaaccaacccaaatgtccatcaatcaacaagtggataaagaatgtgtgtgtgtgtgtgtgtgtgtgtgtgtatacacacacacagaatggaatactacttgtccatgaaaatgaatgaaataacggcatttgcagcaacctggatgagattggagactattattctaagtgaagtacttagggatggaaaagcaaacattgtactttctcactgatatgtgggagctaagctatgagaatgcaaaggcagaagaatgatagaatggactttggggacttgggggaaagggtgggagggaggcgagggataaaagactacaagtagggtacagtgtatacggctccggtgaaggatgcaccaaaatctcacaaatcaccactaaagaacttactcatgtaaccaaataccacctgtacccctgtaacctatggaaaataaataaataaatataaataaaaagagattagaatagtgtctgacttaaagggttcaacaaatgagtaaatgggtcaactagttaaaaagaactaatgagcagtcagccacaaattttccaaattattaagaatattattgccatgtcacttttttaatttttagaacatactttcatgtatataatgatttgaaatattagtcaatgagagtagtagatgtgtatgagtgtatgaagtcagaatgccttcttgagattagggaacatgatcgaaaatataacactataaaacattcaaaaagctatccagtttactttggggtaagtaaaaggcatttttaaaatggcaaatccacatggtagaagcaatccaggtgtccatcaacggatgtccaggtaagcaaagtgtggtgtagatacacaagagaatagtattcagccttaaaaaggaaggaaattctgacatatgctatcatgtggatgaaccttgaggacattatgctaagtgaaataagccggtcacaaaaggacatatatgtatgattccacttctatgaggttcttagtgtagtcaaatccaaaaagacaaaaagtagaagagtggttgtcaggggccaagcagggagggggatgaggagttggtgtttaatgagcacagattttcagctggggaagatgaaaactcaggagatgggtgggggtaatagttgcacatcaatgtgaatgtacctaatgccacagaactgtacacttaaaaattgttaagatagtaaattttatggtatgtactttttatccatccccacagaacaaacttttgaaaaaatacaccaagattgtctctttggaatcattaatgacatgtatacattcacggggaaaaacgtttaacaatccaatattttaaaatccctagaaataaaaatgacaactcatatggctcaatccccttatcctcacatcactgtagggaaatggaggaggaggaccagccttgaggcattgcttcttttccctttctccgaacttgtgcatttcagagtgaaaatcagcactgagactttcttagctgtctcagcttatttcctctacccacatcacagaagaaaaactgaagtgaatcatttccaatagttataaaatgaaaaacaatgaaagtaacctcccaataaatatgtgactagtgccaatgtatttccagaaatgcaatgcacatctgcaaaatatgtctgcttcattctaggaagctaacataacagctgcacaataaagaaagatctctgatagcttctaccataagctcactttagagaacatatgaaatctaacacaactacgtacttttataaaaagcatcataaactagttacaactcataactgattggctccctaccattttaatctcatcttcctcattaataattttagtagagtggctaattcttcctggcttttaaccttcacccatattagtcaatattgtttttacatttacggcagtggttattcatacttgctcacattttatcaatttctctgcctgccattgtttgtttattattttggaattttcaccatatatgattaacatcctataaaatgtactattttaaaatggaccatttagtagctttaatatattcacaaagtacatcaccatcaccacaatctaattccaaaacattttcattactataaaaaaaatcaagtacttgttagtggtcacttcccattttcccatccccgagaccctggcagcccctaatctatttctatgaatttgcttattctcgatttctacaaatggaattgcacaacatatagcattttgtggccgatttctttcacatgcctcatgttttgttactgattacgttttagcctatatcagtaattcattcctttttattgcgaaagaatattctattgtatggtatactacattttgttcattcaacagttgatggacatttggattgtttgaatatatatgtttaattcttgttagaaacaaatgctctttgctgcaaagaataatcagcactctggcaaaagttgtctcagcaaggcaatttacttccatagaagggtgcgtctcatggatggagcaatggcaagagcacactgaacaaaggaaagcaggggtttttattcctaacgcaattggtttctactactgtgtcctgtctccattggctggagctggactgcacaatctaaactggtcctggttggctaatttgaagggtgcaggaagggggttacactggcaagaaggacaggtttggtgggaaaagcgattgtggtgggaggggtaatttacagggttagcagcagatgtggaatgtaggctctatagataagaactgatgggggagttgtttactgagactaggacagggagacataaagaataagtaagttccgctttaaaagcaggaaacaaagaacaagggaacttagacaagctaaacctttgaagaagaacttcttactgtatttaacattctcttgggtatacactactgagtagaattgctggctcatatgatgactctaactctttgaaaaactgccaaattttcaaaattggctgcactattttacattcttaataatttctccatattctcaccaacacttaatattgccatatttttattatagccatcctagttaggtatgaaggggctttgatttatgattttgatttgtatttccctaataactaatgatggtgagcatctatcatgtttactgttggtttttgcattcaatgtcttccttcagcattcggattccttcccactgaagtataacttgtaacagttctttcagaatacatcttggagaggtgaactttcttaatttacatatatccgtaaatttctttttgtcttatcttttgactatttattgacatgtaacaaatacagtataaattataatcatgtagctcaatacattttcacaaattcagaaaaaagcacttgaataaccaatacctataataaaaaataaaagcttaacagcatcttggaagccccactgggccactctaagttactgctctctaatagataacttttatcctagcttttgcaccacacacaagtttgcctaggtttaaacttcaaataaatggaataatatcattcagaacatacatattttttctctttcctaattgttttagtatatcatgtgctgtggggatacatattctcttcagttgtatctactgactatttatttcatgttagattacattctcatgcaatttgcaaattttgtagtgaccttatatttcataatatttcatagagtcatatattattttcatcttggattcccaagtgccctggtttggaaaaacccatatagaagaggttgtttttggtttgactggcattgacctcttggaatggtctaggattatattaaatggtctggcttcatgttttcctaccttagagttagtaaaaatgcaattcaacacctctgcatcttgcttgagattacaacatacacacttctggcagatcctcgatactttccataacttgtccttcataagactgttttagaattgaagcaaatctttgcctcttttgtaaattcaaaaccagattctttgaatggtaatgcagatattaaataagtgtgtgggttaaatgacaacccaaagactctgtttttatcaagaccttctagttagcacataaatatatatttttgcttacataagacactaaatgggatctgaatacttaaaagggatagatatattctatgaagacatgcaaatacaaataattaactatcaagtttccctgtgggcaggtatattgaatccaagttcctcttcttggcttcttgatcccaaacctccttaccaacatttccttctgcttctcaatcttcacaattcattgtagtttgagttcttgatagccctcttccctgtagcacattctagatttctggccttgctattgacagccccacctctgaaaaacctgcttattttattctttaaatatactttttatactatccctcaggctatattttttttctgaagaactatcattttttctagtgctttgtctatgctaagaccatcagtgcttcataaaatgtggtttaattattcatacatagttataacagtaggatctgctttatatgcccctgagctttgcatagctcagggtaggccagtatacttcttaatcccttaagtaaagatttgggatcttgttctcagcaccgtgttttatgtttagtggtcctctttgaccctgtagttatctttgcagagttactgtagtgaggcacctttcacaaaatgagcaatgtttctgggtcaaccagttggatgcttggtacaaatagatttgtctttatttaaatgaagaatgagatgccggacttaaagatacaggttctgagaacttaaatagcatccttcacagcagtctttcttgattaacattaacttgcctagcactgctaggtgtcaacttccaaattggatccactctttcatcttaggatgctctgagttaaagatcttcttgtttctcatctcctactttctcagaactttcttccccatacccacttatccttcacaccataaattttattactctctttgcctttatccccttcaattatgaatcccatcattagctcattaaaacatgacttcaggcttggcacggtggctcatgcctgtaatctcagcactttgggaggccacagcaggcaaatcatttgaggccagaagttcaaaaccagcctggccaacatggcaataacccatctctactaaaaatacaaaaattagccaggcatggtggtgcacacctgtaatcccagctacttgggaggctgaggcaggagaatcacttcaatcagtgaggtggaggctgcagtgggccaagatcatgcgattgcaccccagcctgggtaagaaagtgaggtcctgtctccctgtctctcatatatatacataactaaaataatatatagtaatatatgttatatattatactatattatataatatactataatatatataatatagtatatattgtatataatatagtatatataatataatagtatataatatagtatagatagtatagaatatatagtatatacctagtatactatattatatagtataactattataatatttatagtatattatactatataatacagtatactgtattatatactataatctactagattataatatactatataatcagtatactatattgtatagtataatatagtattatattatagtaatatattataaagtattatagtaatatagtataatatactatacattatatagtatagtatattatatagtatactatatataagtatatttaatagtatattgtatatagtaattatatatagtatatataatatacaatgtatagtatattatagtatactatacgatactgtagtatagtatgctatatagtatactatatacgacagtatcatatagtatactacaaaatatatagtatagcatagtatactatataatatactatattatatatactatattatatatactatactatattatatatactatattatatatactatactatacataaaatactatatatagtatattatatatagtatactatatatagtatataatatatagtatactatatatactatatatagtatactatatatactatatatagtatactatatatcatatatagtattatatacagtatactatatataatatagtatactatactataatatactatttgttataattatctagtatagtatactatatatactatattatatagtatatagtatatatagtatatagtatatatactatatactatatatactatatactatactatataatatatatactaatatattgtatactatactatgctatagtatgctatatactacactatagtatactgtgtactatactatagtatacagtatactatatactatactatagtatagtatactatagtatagtatactatatactatagtatagtatatagtatactgtatactatagtatagtatactatatactatactatactatagtatactctatagtatataaagacatatatatagtcttcaaaatgaagatcctgtatcctatatatatatataacttcaaaagtgagatacatatatatgatgtagaaactttagaatatacaaaattgtcttcttcaggataagaaaatcctgatattcagcctaacctccactgactgtaaaggaagaatgggtttcactttcagggaaggtcaccttcatcctcatgaagaactgtcaaaaatagtctgccaagagtcccagattgaacaccttctgtgtaggtgacaaaaggacaaaaaaaataatcaattcatggcttacgtgctgatatagtcatgggatattaacaaatgcaatcactgtaattattaatggcattcattaaacaccatggtgtgctggtaggttgttccacatgaaactgactatgcaggtggtatgtcattccatttcactatatgctccctacagataattactatgttataaccagcttgcaaaatcaggactgacccccacctaaagttcagatggcaaggttgatgaaatcacaagcacacaaagagggtatggaaaggatgcttacttacataattgaggtctctgggagaaccgggcagacctctcaagcaggtcagaaatggtttgtgagggccaggaaaggtgactggcttgggtctctattatgattcaccgtgggaccagggtgagcattccatatgggcagaggtttccatggtttggatgtctcgctggtgccaaaggagaaagcacccaggctttttcttttcttttttttttgagcttgtacagatgtggctacaagggaaagcagaggggtgaggcttaaaatctatcaacagtcagacatcaaaaaatagaatcagactcctaattacagagcatttgttgacagttcttcatagctgtcattttgcttccatcatgttaaatattttgtagtccactcggtaaatgcttctagattaactgtttgtttggatcacaaatcttattttttgtctaatgtcaagaggaaactctaaaagtgtaagatctttgtaagggcattaagctcaatcacaaaagtgcaatgcttttagaaaactaagccgacactggttgagtccatctagctctagcctgctagagctgccagcactctcccccagttgtctgaaatatgccttcttctgtaattggccttgcacctctgctccaaaggaaggttcagttctgtctactcattgccttctaagtcttacttcctttggcaatatctaaggttaggtcagcagcgtgttttctattgtattaggtgatctcatcccctaggaccctacatgaatttacatgaattacgatctcaacaatcactctctctttccctttgcgtccccattagcaccccttggttgatttgtgccaatgcttattgtcctttaagttatgaagaagaaaaagaaaatctgataaatcaatttcctcctcaacgaaaaggaaaattattattttatacttcttaatcttgccgtgatatgcatatattgtaggctgtatcagctatccactacatacttagaaatttggctaattatcataacataaattaacattttatggctgtgaaaagagaatagaaatggattttagaatgtcaagtatttatcactagtatgtgttaatataaatagcttaataaaaatagggcatttatatgtatatatgtgggtgttcatgtatatatttttatatgtatatatgtgggtgtgcatgtatacattaaatgatgaatttatatgtatatattaaatgtatatattatatgtatatattacatatatacatattgtatattacatatacataatacataaaatgtttaatacatacataatatatacataatataatattgtatattattaaattatacatgtatatatgtatacatgtatacaaaatatgtatataatatatacaaaaaatgtgtatttttgtacatatattgtacaaaaatatgtatattatatatacaaaatatgtatataatatatacatatattatgtaatataatatatacataatgtgtattacatacattatatgtaatatatacatatatattatatacatatatattatatacatatatgtatatattatatacatatatgtatatattatatattatgtatacacatatgtatatatgtatatattatatattatgtatacacatatgtatatatgtatatattatatattatgtatacacatatgtatatatgtatatattatatattatgtatacacatatgtatatatgtatatattatatattatgtatacatatatgtatatatgtatatattatatattatgtatacatatatgtatatatgtatatattatatattatgtatacatatatgtatatattatatattatgtatacatatatgtatatattatatattatgtatacatatatgtatatattatatattatgtatacatatatgtatatattatatattatgtatacatatatgtatatatgtatgtatacatgtatatacatatatacgtatacacatatatacgtgtatatacatatatacgtatatacacgtatatattaaatgataaatttatatgtatatatgcgtgtgtgcacacacacacgagatatgttggttttgtgtaatgcaaccaaataaattaagtatacataggagagagtcactgccctgactcttaaatgtaacccttattaaagaaaatattttagttcattttttatctatcaaccttttttatctatcaactctgaaatctgcaatcaatcatatttggttatgagcaaaataacatgaatgataatctaaaatttctggccaaataacactgggataattgcattattacctctagtactcttagaaatttcatttgccagtcataatgtcattgaggggtgagtaaacttttcaatagcaggtagtttaccattggagaaatgcattctggatatttcccaaagtacacctgagatttagattattttactgatagtttttgagaagaaaataataatcatttttctggttcttcacaccaaaaaaattttaaatgaagttgggcattttaaatactctttggatttagagctctctaattatatttgaatcagaacaaaattccattaaaataattttaatttccaatattatgcaccaagcatctgattttttcatgagtttgccaatggaagttcatgctgctggtcaaagttcccactcatataagaataatttcttttaagaataatttcttttacccttgaagcctcctgattgctgcaagcaatttcaaaaactttttttttttttttttgagatggagttttgctctgtcacccaggctggagtgcagtaacttgatctcagttcactgcaacctccacctcccaggtttaagctattctcctgcctcagcctcccaagagatgggaatacaggtgtgtaccaccacgcctggctaattttgtatttttagtagagtcagggtttcaccatgttggccaggctggtctccaactcctgacctcaggtgattcggtgattcacctgccttggccttccaaactgctgggattacaggcatgatccatcacacccagcctgactcattctttaatggaaaaagaaaatacacatgttattcctaaatgtcagcagtcaacctatcaatgattgacatatcttattttctcaaatacaagaaaaccagtccttggtatcgaaaaggtgatgctgtatagtacatacggtattatctcatttgttttttcaaatgaaaataatttttagtgaatgattaaaatttactaaatctctctatagccatgtctagggatctgacttgttccatatgtaagtacgtgccccatatattgacacaattttagaaatggctgtcagctgttatctctgggagaaaggattagtagagactcattataacttttatattaccatattgtttgaggaatacataatcacgttgatcagatacacatctcagtttacaaactcaagtgtgaaagaaatcttttctcagagtgtgtcttatttctgcaaggggacagacctagtgttgaagtggcattttcaggatgagacaacaatctagatttttgtatttcctttcttttgccttggggtatgcagacaccctgttcccatctggcctttatacactgatgtatgaagccatgctgcattatcctcttcctgtctgtgaagcccttcaccccccttcactggctgtccttaaaccaagttattcctgctcccgggggaaagcattctccatctcctcctctgctgtggttggcaaagaaaactatgaagccaaactgctcagatatactgtaatgatttacaacaaacgagagaaagtcagatggtaagaagggctgggaaggattttaaaactggctattgtaatggttgggaagccactttatagtagatagtcaaggatggcttcttggaagtcctgctatttgtactagtagtgtccattgctgtctccattaaaaaatgatgaatttaatcatgtgtgatgatggtagaacatgatcaaattcattgaagagctggtaatttggcttgaaaggggtgcaaaatagaacaacaactagcgtccaggcgcaggtatccatcagccatcacatctgggcctggcctcctaggagaaattagttccattatttgttttctccatctgtgttagaccccattcaaggctcaacattcatagatatagagtttgagagcccaaacttaagtcatcgccccccaccccaccccgacttggctatgaaagatcaagaatttttcttgccagtttcacctataattttccaaaaacaagttgcactataagttaccccatcaaaaagtggggaatgggccagacgcggtggctcaggcctgtaatcctagcactttgggaggccgaggagggcagatcacgaggtcaggagattgagaccatcctggctaacatggtgaaaccctgtctctactaacaatacaaaaacttagccgggcgtggtggtgggcgcctgtagtcccagctactcgggaggctgacgcaggagaatggcgtgcacctgggaggtggagcttgcagtgagccgagatcgcaccactgcggtccggcctgggagaaggagcgagactccgtctcaaaaaaaaaacgtggggaatgaggggtagaaatgggtactgagcagccaggatccatgaacgccttaaacattcttaaggcatgttaaaggcattgcactattttacctgctaaacaatccgttggtttgaaacatgggttcctcttctttttttcagtggtgtgccaggtaaaggaaagcgtccaggggaatgtagttagggaggaattgcagtcggagaggatttgcctcacatcatgagcttcagcgctgtgatttacattaatattaaatgttagcttgtgtgttgcataccctgaggctttttactccacctgggggtggaaatttgcattattatgcatttctgactctagatatagtggggattttatttttgtctctaagaacaagctaaaatcaaatcttgtttaaatagggacagactatgctgcttaggaaaagcacagagagaagatagggcaatgaaaacttggcaatgaggcagatatcaacatttatacattattgtctattcattttttctcagtcttgtaagaattaaatcttaagccggtgcttcacatttcttctccttgccttatgaaataaagttaacaaaatctgtgtataacaagttttctcacaacaaaacccattccataacaagtacattgagtaaatatctatgtaggaaaccgtatgttaggcagtgtcatcatgtcctaccaaagaccaacacccatgtagtaattgaattattccttaaagccacatcgtcaccagattctctggtatttgtgttttatgtgtttgtgaaatgggtattttgatgccttgccttactccttttttttttttttttttttttgtgagatagatagggtcttactctgtttctgaggctggagtgcagtagcacaatcatggctcatggcagcctgaacctccccagactcaagcaatcctcctgcctcaggttccgaaatagctgtgactacatgtgcgcaccaccacacctggccaatttttgtattttttttttttttttttaagatgcagggtctcgccatgttgcccaagctggtctccaactcctggacttaagcaatcctcctgcctcagcctttcaaagtgctgggattacaggcgtgagccagcaggcccggccggtgccttccatttttgactgtaagtttaaaaggatttagaagaatttaagcttgaaaaatcaagcagagatttggctcaggttaggttttgttttgttttacaaaacaatggagtcagagaaactgaatattctctctcagggtaactcctaccaacagaggcagttgccaggacgataggggctatttctacactggcaaagaatattatgtaaaagtgccttggttattgttgttgttttctactacgagggcaacaatcacacgtagttactttttcttctacaatgtgcattgagctcatattattttagaaacgtattttactttgcctaattctagaaccggttacttacatgtctgcctctcccttaactcctaacaatgaggcagatagcatatttttgacatttctcgatccctgtgttacaggatttttgggatgtcacttttctggccagaaacctctgtggccagtggcacctctgcctgagttttgcttgggcccactggcctcattccgcccactcagcctggcaggctgtgctcaccttcactaccggtctcaatcccatgcctgccacgggcgagacaggtgtggagtggcaaggggtgtgtgagcaagtgtagggtccagccactgtgcacagccagacatgctggctgttgctgaggggtgggcagctccaggtgccagcacaggcaccagctgtctgcaaggctgcagcttcccctgctggcaccagggaatgcggcagcacctggaagcttggggactccaggaaccacaaggccccaaagagggagtcacagccctggctttgggagctctcaagtctgggctccctgatgggctgccgctcttctctccttctcttcacccacaatgtggcaagcaaggggcatgtttcagccctgtttgtgttacagctcttttagccccaccattcggggggtcctgaggagttttgtcctgcaaccaggaagaatgaggtatgtagacaagtggagggtgagcaagacgtaaaggagttttactgagtgatagaacagctcagagaagacccacagggagtagctcctttccaaagctagggtgtcccaacaagtgttcagctcctagcagagagggtagctcctctctgtagctggtcaccctgacatctgctcagttctctggctgagcccagggcttttatggcctcagaggggagaaagtgaacaccaattggttcatggctggccaagggcaggattggcaaaggcaccacaatttcccactccaggctgtgggactggcagcttggcccccaggcttcaggccctccctagctcattggtgcccaaagtccagatggggccaaggtggcagggacttgtcagcactgctcggagcatgtacatattgggccaggctgcaactgtgcccaggcttagccctgactttgctccaagactagggcagatgccatcagcagggagaagccctgcagtgggagagggcacttcctagctcattggtgcccaaagtccagaggaggccaaggtggcaggggctggtttatcagcactgccccaagcttgtgcatacctggccccaagactagagcaggtgccaacagcagggagaagccctgcagtgggagagggcacttctaagcctgtgagggcagagagggcctttacaggcccccaaaattacagagatggctggtctgcagcagcagtttggatggctgcaggtgtacctggggggagggttgtgggtggggttcctgcctactccatggagcagggggctcagatctgcagccactacttgggctgctgtggctgcacctggggagctcctaccccaatatggaaggggcaggtgtcccatttgtccctgattccctcctgctctgtagagtatgcagtcctggctgtgcctcctccaagcctggggcagggactccaggtccttgctgggctcctttctgcctgcccctcatgcccgaccacactgctccactgttagtggcccccaaggcaatggactgggcttgttgggggctcccaccagctctgtgtagtacagcaccacccctggctcaggtccacctcctcctcgtgccttccctgcagtggccagtgtgacggcagcagccactccagggagtaattaagatattatttggaatagatgaatgaatggataaggaataaaagaatctgggggtaggtgaggaatataatctgtaaaagtgaaattagcattgctataatataatggatatttcaccattgtaatttaggaatggaaaaattagatcaattacttcctttataactgctaaaaataaacttgggaaatcctgaaagagctgtaatcttagactgtaaaactcttagtttttacaggttaatagttgttcaccctcatcactaaaaaaaaatgcacatatatgtaataatatatttttaatcttatgatgattcttactcttattagtacattagttcagtcacttcaaagactaaggtctaatgttgctcatgtatttgcatctgattttcactaaagttataaaggggaaacaagaagttgtatcctcaaacttggaggttgagattagacaatataattcagatatagaagtaaacaaggttttatttttcagaatatacctcatccctcaaatgtataaataaaaaatcacaataaaaagaatagtgtcatagagaaattaaaaatcctctttaagcttagaataacttaagcttagaataaccaagattccattcataatgaacatgtccaaaattgccagtggagacaatcctgaagttcaaggcaactgcaacttgaagttacagctgaaactagaatgcattctgttatggtgctttttgctccctctcagaagattttctaaggtgacactcagaaagcaaatggcactttgacactgttaagcagtagcagagctaatatttattgtttgaaagcggcatcaatgtcactcactttgattgggctgtttaaggccactgtcatttggacttggattggccactgaatcacccctttgttattgacttgtgtattgttatggaactgataaaaatgtttgggttggttacaagttccaaggaacttcaaacagccctacagcacaattctatgtgcaattgggaatcattcattttccagatgtcagagtttgaaagacttctctgtatagaattgaaaatcgtttgtgcctgaggacctgggatatttttctattccacgctgccatttaaaacatttaatgacttttaaaagaaaaaaatgtaatgcattcatcactttgggaaaaaatgaaaaggaaacattttgacatatcttgagagcatcacaaatgatgtggggtcttgatgaagggccctccagtttctgtttgtttgttgcctgttttccacattgagatacagaagacaaggacactcatgtagctggtgtcatcctcgccttctttgcatgcctttccatccataaaattcaacaaatatcagtctagcagcgctttattaaacactgcctacctatagagctgaaaccaacatttacgttaatctttatccaccttactaggacttttttattaatgcacccctaagccagagggagtaactgcaaaaaagaattgacatgtgatattccaggcttgatggacgtgtcctagaaaatgtcttagggaagacatcgtagggaaccaggagatgcctttatgttccttgttaattaccatgtacaaaatgtgaaaacagtttcctgtataattcctagtgaccacgaggttgcatttctctatatagacacagatgtactaatgcttgtagtcctggtcacaatcatgctcagagatgtatttatagtttgtagatgtctccctattgagagccagaaaagaaattagctcttaccatatgtcacatactgtgctggcttgcaacccaagatcatgttccttatataggaaagaaatgtgattgcaaacaggaccatgtgatgttcttcatcatttctttaccaacaggtgttttcaacacaccctccgagagagtggttaaagtagaatttcactctgtagatgcccccaatttccttggaactcattctctttgtttctgtagtgcctctaaccctgtttttcctccttcagtggccagtgatcctcgtgtgacaccttatctccctcacctctaatgctagtggactccagcactaagtacacaaacccattgtctacattcaattccaatgtggtctcatcaaatctcagagccttaaatctaatctttgtctttaccaaattatatttcttgcccaatacttatttccttagagtaaaaatttatatccaatagcctactcaaaatctccactggcatgtgtggtaggaatctcaaatttaatatgtataagttaaacccttggtcttcctccccatattctcctgctgacttcttatctcagtgacaactcaatggttccagttgcttcagcaaagaaaagtttctttttatgtcccatgaccaatcctgtcagttctaccttgctgttatacccatactccagccactccttatcacctccactgacagccaaaaccagcacaaccacttcctaaaaggagtgaaagaccctctaccaactggttctgctcctgctccctcccacacacaaaggaaaacacagggatcctttaaaaaaaaatgcaaatacaatgaatttactactctactcaaaaccacccaatgggaaaaagcaacgtattaccaagacgtacaaagccctgcctcatctagacccagctccccacacccccaccctacctcatttcctacccattcttctttcttattgactcccctccagccacattttcttcttagaatgctcttttccctcctgtgtgtggctggactccctggtttccttcaggtcttagcccaagacactggctcagtgagaatttcttttttcatcatcttcaaaatagcagtcttcatcctagaaacaacttatctcccttcactgctttgtttctcttcttcacacctactaccacactctagattgataaatagataagatatagacatacaatgggagcaacatgaaagacaggattttgttttacctatgactacattctcagcaccagaacagtaccagatatgcagcaagtgctaaatacttaactgcgacatcaacagataactgaaagcacacatattgcttacccttaagtccttcagcctcagacatctctggcttcccattgtgttgctatttaagtttcaacactcatagctaaatgaatgttgaaggagaatttcataggatggagtgcctcatcattccgtgggcacatgggaaacaaacagacggaaaaagaggcactgtgatgaaagaattggtattgatgtaattcattctctgactgcataccacacagacacttttataggggcaaaacactcatttatatcttaaggatcttgtgcgaatggactggacattcaaggtgagtggtgcctgagggtatgtattagaaacacaaacaacatacggaaatattctatgtatgtgcacgtgtgaggtatacatgcttcttctcctttataaaagagaaaaatccaagctgcttctgaaatctggagaaggggcagaatgtcgagtacatgcatctttacataaataccctgagtgaatttcccctttgggtatatgacatccttgagtcagatccttctgtcagagaatggaaacaaccatttccagatttagaaataaataaatagtagagaatagcagttaaggtccaaattaatcctgtctctgccgctttgtgacttatccatccatatgtaggaacaattacaggttgtacctcacgagtttagtggaagataaatgaactaactcattttcaagtaaaatacttgaaaatgtattgggcaaatagtaagcttaggattaatattctctttttaaattcaggactatgaacaatgatctcaatgatctctatgtaagaaagttctcgttcattttagatattacttgtatttatttaacaaaatgcccaaatactaaagatgcagaagtgaattctataatgccttcccctaggagtgcaaattcttttaatagagaaaaggacaagtaattataaatatatacagcaaaaattattgcagcattgaagtcagataggttagttttagaatttgacgtaacataatcacaatggaatagtacctgctatccccactttattcgtttacataaataaaaagtttagttaaaaattaaatgatcaaaataaatataggagacaacacatattttaaagatgacttaggaacagaaacagtagatagttcaagaaagatgcatctaagcctacactgtaaatgaaatgtcaaagttaagaatgaaatgtgacattgacaaattaatttttaaatgagtaagaaaagcaatactttgaacgaaattgtgtttgagaaaagatgtcatcattagagttttatagtcatatttacttctcagctcatgtagaaattaaaggataacagattgtagatctataagctaagatcggaaaatggaaagaagaaataattagtatccaaaatgaggtgtttttttttaagatggagtctccctctctcaccaggctggagtgcagtgcttagctcactgcaacctctgcctcctgggttcaagcgagtctcctgcctcagcctcccaagtagctgggattacaagtgcacaccaccacacccagctaatttttatatttttagtagagacagcatttcaccatgttggccagcatgttctcgatctcctgaccttgtgattcacctgcttcggcctcccaaagtgctgggattacaggcatgagccatcgtgcccagcccagaatggatttaagtgactcaaatggaggcaacagcattattctgctgctacatttcaaggagcccctgaagaccaggtgcctttccattaaagcagggtgagggttttaaggggtagggaaatctgggtacagactcttctggtttaggctctgaaaggagtttgcatcttgatgcatctcgaagaggaacttggaattgagatatcatcactgtatttgtgtctctttgacggacaatcccagaaaacatcagaacagcaatttcagagaactgtgttttccaacctttggatatgtcagtcaaagtccaacctttcacagggtgagaataaagtcagggagatgccggagaccctccaggatgtgtttttgtccatccccattggcttcagttagatgttcctgaataaatggacagactaaactgttgtccttattcaataagacagcgtctaccccaagaagcttacagacaatctccaactgcagttggagtatgaaattccttcaaaacaatttgaacgttggagaactcagtatctcaatttccatgttgaacacagattccagtaaggtaacagatcttgactttctattttctaaaataatttacattttgatgggaggaggggtgattttgtttagttctgaatgttgaaaaaattcaagattatatattacacataaatcagtggccaatttccatgataaataatctgttaaacatgaaacaagatgccattatttcaagggaaatgatattcccaccccaggggaagcttttttttcccccctcattttttaaatgtcttactcaggtaaaaacaacatttattattataaaagagtgatatcattttttattagggctgtttaaagtagtctagatacaaatgatcactttgaaaataagatactctcccatcttgagttgaaatttgccaggaaagtcattttatgagatgatctatggaaccattctacaagaatattttaaaaattgtaaaatatttagagtgcaataaaaatgcaatgtttttgttgtctctctcatgctaatttctacattttttatatcaaagaatattcaatacatcttgaaacaggaactccctcacaaaggtaggtaggagatgctagtaaaccctgaggagagttttagggtggttgagccattttgtatggacccctgaaatttaaaaagggcttgatacatgcctggtatcagaatcaaagatcactagcaagaacagagatttccagctagtttttaaacccatgcttccctttgataaacagaaaaaaaaaaattatgttcttctttaaagctgttgaattttttaggataatcggttatgatgattaaatatgaatgaaagcaaagggacaaaacactttatttccaaactcccaagactctaatcactctaaggggaataggactggacctgccttacatagccccctactcacacaaattgctgctcaagacgccatagacttatgcatattcgccagctctgcgtgctccaatgccctcagcagtttgaggggacatcaaaacaggtacaaattactgagacctgacagcggcaataggccaccacattaaattcatatgggtcatctccggcgtatcataatattcacagagagaaatgaactcaccctcacactttattggaagcatcctccaatccttttaccatctgctttcataaatgagtctgactcctttgactattttagcctccacacaaatcagaacacagattatttttcaaaactctttgattatcagaatcaaacccataaaagtgttttaaaaaaatggggtggggagattaaaggagagaaagatggagtaaaagtcaatgatgcagatactttaaaatgtggttcattaattgaaggttgagagctccatgcctgcccaaaaccatttcaagattgaatctcccaacaccctgatgagcaggagctcaagtttgagtttaatttaatttagacaaatatattggcatattttttgcttgtaactgaaccttcttgaaaatgtagagcattgcatacatttaaacaatgataatcaatgatttaaggatgtagtgaagatgcaaaggaggacattaggaaatgaggaatgaagcaaagggaagggcccatgacccagagagaaactgaggcaactgtgacaacatagctcctcacagtgaggacaatggaagcagagatgtgggagctcccaggttcctggagagaagcaaatctatagcacagtcacttttctgctgtagagccgcatcttacatcagataggctaacaaaaaacttacttaggacctaagacaagggtaggaggcagtttgaaatgattcccaatggtcctagtatctggcattcgtgcgcttgtgtaatcatcttccctgagtataaactggacccagggactcacttctaatgaagaaaaggcagtgcacatgaaggactgtcactcctggggttagattataaaaagattgtggcttgtatcttggtgatactctcctgctctctgccagttaaacactttggcaaagccacagcttataaactgctcgatggagaggcccatgtggcagggaactgaaagaggcctccagcccacaacaaagaaggaactaagacctcagttcaacagatcacaaggaattgaattctgcccacatgcactgagtgaacttggaaggggatcctgcccctgttgaaccacaagatgattgtggcccccactgacaccttgatggcagccttgggagagactgagacagaggacccagctaaactgctaccagattcctgatgcacaaaactgtgagacaagaagttaatttgggcaggtaaattgccgcacagtaatcagtaactaaaacaagctttcccgtatgccattgcttgtccatacctcaccttcacttttcctctgcatgttttgataggctaacaagtaagcactcatctcttccccgaagatgtcgacttcctaatccccagaacctgtgattagaaaggggctttgaagatgtgattaaggatcctgcgaggggaaagttttcctggatgacgtgggtggacccaatgtcattacaaaggccattagagaggtaagggggttgatgtcagacaaagaaaatgtgatatggaagcagaagttggagccatgcactttgaagatggaaatagagatgccaggagctaaggaacgccatctgcctttagaagctggaaaggcaaggacgtcgattctccccagagccaccctaattttagcccctaagacccattttggacttctgaccttggaatttcaagacaacaaatttgtgttgttttaagctacttaaatgtgcggtaatttgttacagcagagataggaaactagtacatatgaatatattctgtcctattattttcattaaatcagctcactttttatatacatctattgtaaagaggctttgatactatgagtttggagtgctgattgtatccatccctccaccatatattctgaaagcaaacagccaatgaaatttaaagatttaaaaatgtgcccctaacatcatgttgtgtataagaagtgtgaggatcttactttaggatgcagcacagaaggagaaatgccacatccagcctctcagaactcagtcctttgggcaggataaggctttgtgtgctcaagttcattttgggctttgagtacaacagatttggaagcggtcactaacaactacaaatcctccagctgaatttacttatctaattaggctttcaaacttgaagacttcactgggtcccagtctgctggctacatgtaagacttcctctagaagagcacggatatttttccctcatcatgaaattgacctacactggaattttttgtttgctgtctgtggactcacttgaagagggaattggtgctctactcaaaaccatggtccacagatgagtgaaataaacccatcagggctggtagcttcatcatggaccagtggttctcaacttggggtgattggttccccaggggacacttggaaatgcctggagatttccaagagtcaagactcaaaaatgatacagacatttagtaggcagactccagggatgctgctatctatcctacgatgtcatccccccaactcacacattcacacatacataaatacacaacaaatacttattcagccccaaatagcattcgtgctgaggttgagaaacccgatacaagccaatacatatgctaagtctactaaattactaaaaactcagggacagatgagataagacaaccaggtcctctggtattattgtagactatcctttaaaagcataaagggttaaatacaaacagcccaggcaattacgtcaggaccaggaaggtagagagaagaaaacccgtggcaggggaatcgccacagaagcaataacttctccgcagtgtcaggtgccacttcgtgtcccatcaatctgttcttagcacatcaaaatcaggggagaggtaagtgcagggttaaagggagtgctagcttcacaagccctccccatcactatcatagcacaaagtcagagacaaaaagcgaaaagagaagtctaaaccccatgaaggctgacattttaaaataatgaaataaatgctatatgaagcaatggcagtcaaaccaagaatgctcttcagtcagaatagagctcacagtaaccaatgctgcaatcctaacatggataggacagcagaggatatgggatatcctgcaacattttcaagaattagcaaataacaagtgatcagagtgccagaaaatatatgacttcccacaaaccataagaaaaacaaatcccttgttcaaatacagcaatccttcctaagtaatggaagattactagttcatgaagaatcaaactctataaagaatatatctgtgacagcagttggcccaatactccccagttgcatatcttcttcctgtacacacacaaaagctaaatttccaattctcccatgcagttaagctggagtcatgtgacttgattctagacaatgagatattaatggaagtgatattcaccattacaggcctagtcttaaatgtccccttatgtctggtcacactctttttctcctctgtagcaactaggaattccaagaggtagagatgtttttaccctttgagggaaaaacatccaggaaagcctaatgacctgcacttgtctatagcattagtgatgaaatacattaagtgatgaaatacattatgttaagccactaagatttagagcatatatatatatatatatatatatatatatatacacacacacacacacacatatacatatatacatatatatatacacatatatatacatatatatatatgtatatgtatacagagagagagacacagtttcactcttgttgcccaggctggagtgcaatggtgccatcttagctcactgcaacctccacctcccgggttcaagtgattctcctgcctcaacctcttgagtagctgggattacaggcatgtgccatcacacccagctgattttgtatttttagtagagatgggggtttctccatgttggtcaggctggtctcaactctcaacctcaggtgatccgcctgtcttggcctcccaaagtgctgggattacaggtgtgagccaccacgcctggctagagcttatcttttatagacatcattggctctaatataagacctttgtcattcaaagtcttaacatattagtttcaactgtttgaaagtatattaacaaattactacaaactaggcagcttaaaacaacatgtatttattatttctagtttcgtgggtcagaagtctgagcacagaatggctcagccaggcccactgcttaggtttcacaagggcaaggtgttggccattctgggccaggcactgaagaagattccactttcagacttattctggctgttggctgcattcagttccttgtgcttgtgggacggaggtccatactcctttcctgtcagctaaagtcccacagttacacctgagggtgcacacttcctctcatgctgtggcaggtggagtttctctcacttttcaagtctttctgacttcttctgccatctaactggaaaaagttctctgcttttaagggctcatgtgattagatggagcccacccagataatccaggaccatctccccttttaaggttcagaacctcaaaatctgcagtaatttttgacatgtaacataacatattcacaggcgctcagtgcttagggtgtggacatattgggggtcattctgcctaccacaaggagtgatgccaaagtttcataacctgcagtaagctgtcaggttttcagaggcccatatttatgtcatgatcactggttttcagaggcccatatttatataatgatcactgctatgcaagagcacttagctatgatggtccaggtcaactactcagcatcctcacatccaagcccattccacttacttactgctattgctatgtggtaactctcatgaactgttcctatgggattttccccttagagatttgcaaggatctgagatttacccattaccaatgtgaagaatcagtattattatttttcacttggtttatgtatacatcatacatattgtcatttgtctaataaattacatttaattctccttaagtagagagggttttaggattctcaatcaatccttctaattttctttataaagtgtcaagtaaaataatctctttaagtattaatacaaagcatctgcagcaaatatatggcacacatgttacctccactccctcccatacccaaggaagacattgttagtcaatcatggcactcttttccagtggatgatcagctacagaatctctctgaaatcagagttccagtaagtcactaccaatcaagtggagctagcaagactttaacaccggcaactcagagaaagctgcccaggtaaacagaattatgtaaattggcagccttttcctacttgtattatttttaatattaaattttgcagattatatacaagatttgtttgtaagatttaacttataacctgcttaaagaaaaaaaaattctgaaaacaaccaaatgggaattttttcttaaagtcgaaatcattttacttatttcaacctctcactctaatatccttgtaaagttcacaaaagcctcaattcagccatagattcagaagctggatcacctctgagctctacagagaacaaacattctctttgttttgggtggggtagtttttcaagatttttaaggaacattttaaatggctccaaactttatataataagctttatgatgaaatatctggctgtattatggcgctgactcttttgcctattaaatcatattctctttactccataccagtaaaatgtggtgctatggctctctaactttagcatggagagttacaaacatggttgatctatttcttgcactttgagcaactgttcattatacatccctctggacattgcatttacatgagtgtttgtagcttttctgctctcaagatcaagattacatttgcgaaaggatagcaatgttctttcaagatgcctaaactataccatttagtgatgtacggattatctagcattgttcagaggattcaacagagtaggatgcattaacctaaactcacagatcgtgaccacagagagatgggagatgttaattaccatgactagcttaaccttgtcctatcaaactaataagctgataaaaccatggtaactccaagtcctactaacaaattctttatatgcataatatattaaaaatcaacgactccaggctgtcctctctcctgtcaccatttgttttataaggtaatgccatagcctactgtcgatggttcattaatccacactcattaaaccagtgtgactttgagggccattgagcatggtgaatttgcccttctgcaccagaattaaataaacatcgacactaaataaaactgcagtgatcttccaagatctctggtggagtagttaatagcccttggaatgtctcatttccttcttgacgtggtatattatgaacagctacccatttggagtgctgtgtaaaatagaatacaagctagtttaacacctaacattaaattgttggtctttttttcttcattttatcactgtcaatgttctcataattatttcatacaaagggagtcacagatctgataatttacagatgggtcacataggaggttaaacaatgaaaatcgtatctatatatatacactcacacacatatatattatttatctgactcactagtgttttataattttgtgacttggttgccaacactaacaaatatgaagattttatataaaaatacaaattcttttgaagagtaagaagactggcaacactagacttgaatcctgtaacacggctaaagaggagacacacaccctctctagtttcttacggacacaatggttttgctccttagcaatgcatacttaatgcaattaatgacttttatacttgcttgttacctatacctagcctaagcccttgcaacacacagtgtggtccatgaatgagctgtgtcaacattgcctgggagattattagacctgcagaatcccagactccatctcagacaagatacccaggcatttcatgtgcccttgaaagttcaagaagtactgacagagattcaggttcacacaggatggaaggcatatactcagttttttggggggttgtcttggcttctactgccttttagtctcacttccaccttcctcctctacatactttgctctttgaatttaatgctactattgatatattctagtcctctccagtctccacttgtcctctacagacattcacaggatactgatacctaagggagcaaaaacatcctcattctacattaatagtgctattaaaactaagcaagttttcattagaattataggatctctggttcaaatgtggcattgtgaaggtcttatagccacatggttcctgcagtgggctgaatggttcccctactccccaagatatatctatgtcctaacctttagaatgcgttaatatgacctttattggaaaaagggttattgctgatgtaattaagaatatagtgatgagatcatcctgaaaaatctgggttggccctaaatccaatgacacgtgtcattaaaagaggcatacagaggagagacatggaggggagaagtaggccatgtcaagacagagacagagattaaagtaatgcaaccacaagccaaggaatgctgacaaccacaagaagctggaagaggcaagaaacagaattgttcttagatcttttggagagagcacagtcctgctaaaaccttactttcaaatttctggccttcagaactgttagacaataaatttctgttcttataaggcaactggtttatggtgatttcttatggcagccacaggaaattaatatagttctcaaagctggttgcctatcagaatcacctgggtggtatatgagtggtgaaaattgcagaaggcagagagtggagctagggagaattctttacagctgagaaagaaaaatagccagcagcattgacatcatcaggagcttcttagaaatgagttagacagagagaatctgaggccccagacctactgaatcagaaactgcattttaacaggatctctaagtgattcatagatacattaatgtttgagaagcccttcaatttcaattagcaaatttggcagagtgtcttcttgatcctgtgtttgtgttgatcagaagtacaaagtgttccttctcctctgtcttgtctaagtctatgagataatgttcgtaaaaacacaaattccagaagaattcagaacaaaaagacacgcaaattctaacttagggggcgagagcccttccaactccttaataggacactgtgagaacaaagctagataatgcaccaaaccagatgtttgaaacttgtgaacaaaggcaagggctgctaatgcattcatttccacttactacccaggcaaaagaaatttgtgtattaaagtgtttatctcaaaaggggcttaatctgacaactgaaagcaacaaagttgggcgaaattgctgctgagaatttgaatgtaagaaattctcacctaggtctcaaaataatagcctattaaaatcacaatgggagagtggaggctcaggcaagctggacgattaaacaaagtccagagccagtggaacgagggaggaatgatgagggaataatgaatacatctgctgatcctaaattcggaaatgccaaccctacaaagcaatgcctggaatgaaagcctttattgtttccggctctccacaaagctggtactgcccagtttccatggataacagtacagctgatagactaggatggggaaggagggagtttcataccatctgcagattttcatgcaatagagaaaagaggtaacgatggatgaattagaaaaattagggaaacgtgaattgctccacctcaagggaacatttttgggtattttgaaatcaaaatttctatgatgtatggagtgaaggctttctcatttcactttatctagatggaggaaaaggaaaatatgagtgaatattggaagagattcagtaatttaagtaagagaattttaaaaaaaggcctagccagttaggttatccacagaaatatagggacacagaggatgaaagagaaaccaccaaaaggtaaaagcatgaaaaaaagtggacagaatttaatacttttgtacctactatgtggtgagtatacttcatattatctcattaattcatttaaaatgggtcaaaatggataaatattatctctgttgtacacatgagagaattgaggctcagagaggtattgaccaagtcacacaaatagcaaatcatgggggaaaatggaaaggaataactcatgtttcaagagttcacagtatgagatactgtgggttacagttattaactggtcattgaaatagtgatatctgaagcagaattcaagtgcatttgtaagtgttattcaaaacattcataatggcctatatactctgtgtaaaaaaacattcataggtttaaatgaacgatagagttattacagatggtttttaatccctaaggcacctgggaattagcatgaatctggaaatatgtaaatgaagagagcagctaaaactggcagaagaaaatctgttttgcataattgaatctcattcatttattcaacaacttgtattgaatgactatttttggttggcacttttaggcagtaaggatgcaaaggtaagttagacaaggtcttcattctcttagcatttgcctttagttgggaaggcagaggtaatctgaaaattagaattcaatgtgaaaagtgctctactagacataagaagcacaaagcacacaagcataaaaaacaaaaagagaaccaatcacagcatcatgttcaactgccttgggaattcaggcactcagaacaatagaagtttattccatctgctaataaggccaaatatcaaagaaaataaatgaaaggacaagccagggaaaagaaccaagattccatgtggaaataatctcacccatgtcctgtacccctccactttcagtttcaataccacaaattctttttatgatttggttagcagttccctctgggcgtgtaataatcttggctgttatgtatcggcagctttttaattggtcttcctacttccattttggccaagctccaatccattctttccactgcagcccaaagtgtcttttgaaattgcaaatcagaacaagccacctgccctctctttgtttcaaaacttcaatattgtctcgttgctcttagaacaacatgaaatgccacacaacttgcacaacctcacctgctcttcaaccccatctctcagagctcccgccccttctactttccagctatactgattcttccaattctggaatctgtggcagcctccccactgccagaagtctttgcacgtgctgtttcttgactgccaaggtctcataatctgatcagccagtgaacaacttctcaccctgtatattccaattgaggatcatatgttaccgttaagaaaatctgttcctttattataacaagatagtaaaacagattggtcaaatctcagtgtttccagagccagaagacctgggttcaaattatagctgtaccacttactagctctgtgactttgatctcaacttcttcattggtaaagatgggtagcaaaattagtacctgctcctagaataattataaagttatatgagatcatacatgcaaaacatttcccatttctaatttagaattcattctctatccatctttttactattttttcatatatcacttgtccttctcttaattcttttccctgcgtctcttaatgttctgcgttttttctatgatgtatctgtgaaaaatctaattttatggatctgcttgtactcacagtaaaatattggtttaaaggctcacatcttgcttcaatcctagaaaaaaaagtcaattattctctttaaatattacttccttaccattctctcaattttctagaactgtattattcacatggagaaaatgttgaggctcaatggaaaaaagggcattatttagacaaccatgtgagcatccatgtcccataaagaccagctagtaaatcctgttttaggcttcatgggttaggcttcatgttgcaggtattcaactctacattgtagtgtgaaagtggacagtgacggcatgcaaacatgtggctgtgttccaacaacacatgacactttacttacaaaaacaggcagcagactcaacttggcccatttctatactttgccagccgttcgcttggcacattctgggtcacctgagtctggccttccattgccattgccctgctttacaactctctcagtcgtggataactgaaagcaatgcaaacaaattcttgtccttggacatgacaattctgacccatggagacttagttcacttggccctcaatctcacaaagaaaaagcctgtttcatgtcacgtatttgtaagttcattttaatatctttgttctatacaaatttgtctttaacttattcaaaccagttgtaacattttacagattccctaattaataacaggctaaatcaggccaggcatggtggttcaagactgtaataccagcactttgggaggttgaggcaggaggatcacatgaggtcaggagttcaagaccagcctggccaacatggtgaaaccccatctctactaaaaatacaacaaaaaattagtcgggcatcatgacgcatgcctgtattcccagctactcagcaggccgagacaggagaatcttgaacccgggaagttgtaatttgatcgcaatgtggtcatggtagcatgcgaaagagaggcttgaacccaggaagcagaggttgcagtgagccgagattgtaccactgcactccagcctgggcaacagagtgagactccatttcaaataaataaataaataaataaataaataaataaaatctttaatgtgttcatttttcatctgtatgagaattacgatttgtatcttttttattaatattacccttcaacatacgtgtgtcggaatctctcagtcttcataacacctaactggtttttcatagtcttaaacctctttgtcatatatgatggtgaattctcagtaatatcggcaatactaattctctttttgacaatgtccattctagaatttggccattcaccgcatgcctcatttgaagggttatgcttctaatgtcaacatttccgcatttcctgtttcattgcatcttattttatactctcttattcttcctcatggacacagtttccgcagataagtctttgagtttcttaaacatacctaagacaaaaagcttcatctgcgcaaggcatcctgaacagtgcctgacacgtgtccacattcaaagaatagttgttgtcttaggttaagtttttccagatgggttggtctaatggttctaattgcttattttgcagcctccttggcattaatttcctgtgctttattcacaaaccattctaacatagcacatctgcacttactgcacatacatacgaaaactttgagtggaatgaattacttatttttcactttcccttggtgatcacacacatgtacacacacatacacacactacttttgtttatgcctccaccagccctctgagtctcctatctggcattggccttttaatggcaatttgagattccaattttgtagagacaaagaggacaccccatatccagccactgaatcgggtgatttcatttgagacttggtttcaaggctaagactgcagtctcatatttccctaggtcttcagctttctgaaatcataagcctggcaacaatctgcagagtttcttctagtgggtttacagagcagtcccatcccaactctgtcctctaagccataagcatgcctctgttttcctaccttcatatttttaacctgattacctgcaggcactgtcctcccagccagggctgcctgcatccagaccaggagctcagcatgagatgttcattctgtttccaagcctagctatgtctctgttggtatttcttgcttgacatttcgtctatcatgactgtttctgaaactgagagattaagtcaaagtatgataataccataatattttgaccacaactgtgtttattattcacattgtataacatgactcatttgcatattaacaaaataaaataaaactttgcattgacagaaaagtccactagttacactacttagaaagacataaatagaagtgactaaaaaaaaaaaacttaatgggagcttgatattttttttttttcacgtgccactatgacaacagtgcaatcaaattagaactcaggattaagaaactccctcaaaaccgcgtaactacatggaaactgaacaacctgctcctgaatgactactgggtaaacaacgaaatgaaggcagaaataaataagttctttgaaaccaatgagaacaaagacaccacataccagaatctcggagacacatttaaagcagtgtctaaagggaagtttatagcactaactgcccacaagagaaagcagaaaagatctaaaatcgacaccctaacatcacaattaaaagaactagagaagcaagagcaaacaaatggaaaagctagcagaagacaagaaatacgtaagataattaattttaaaataacctttagaaaagctaatgaatattgcactgatatctacaaactgataaaaactttgctgccacctccaacatgcaatattaaaacattaaatattttaaaatcgctccaaaaataatgttaatccttgtttttttctgtaattttccaattctaaagacaatccactagtctggtgtacacttttgagctattctgtccaccacctattaagaagataatatcttaattcaaaggaggttcatacaaagagacagaaaattgactgcttaatgagtttgcaatgattcctttctaataaacttagcacatctgcattactggtcatatatatgaagagtgaagtttgaatttgttccttgaagcttatgtagaaatcagaaaagcagacattttttccagtgtcatatctgaacatacctgtgtattctttgggttcttctcatcaaaactcagaataacagatcctggccaggtgtggctcatgcctataatcccagcacttcgggaggctgaagcaggtggatcacctgaggtcaggagttcgaaaccaacctggccaacatggtgaaaccctgtgtctactaaatacacaagaagtatctggacatagtggtgggcacatgtaatcccagctactgaggaggctgaggcaggagaatcacttgaacctggaaggcggaggttgcagcgagctgagatcgcgccactgcatgccaacccgggtgacaagggcaaaactccatctcaaaaaaaaaaaaatcctggagattttaaagatgggcagtatcaattagattggcagtaaccaaggctaatttaacttccaagggacatttgacactatctggagacacttttggttatcaaaatggaaagaatatacagttggcattgaatgggtaagaggccagagttgttgcaaaacatcctccaatgcacaggacgccccctggataaagattaatctagacctaaacgtcagtagggcaaatgctgagaaactcaggggcagactttacaattcccatttgagaagcgtttaataaattgtatgtctaatatatatatatacacacacatatacatatatacacatatatacatatatacatgtgtacatatatacatatatacatatgtgtacatatatccagagaagatatgcatatatttatacatttatgtacataacatcactgtgtatgtatatgcagggtgttttactttgcaggaaaacatgttgttattaaatttaggaaatttcctcccacatgtcttggtttatcccacaagagcttgctgtgctcaaagatactaccttgactgagcactttctcataaacttgctgaaccttcataaagatcccaggtgggtattattattattccctcagtgcagatgagaatactgagatcgagaagcgtttagtaacttccctgaggccatagaactggtaagtggaggagccaagattctcacccagtctagttcatcttactcattgtttgcagtgtttaattgcttacccaataaggtcattaaggcactttccactgggaagtgttgccttccatctcttaggaatggtagatgtatgtactagttggcacttaagaagtggtgatgtctgaaacattaagaaaacttcagcagtgaaagaaggcacacatcaaagccacagagatgaatgctaatgagaagagtaaacatatgaaactgcttttttcttccttcaaaaacaatttccaagtccctaccaggtgctgtgcagataaagcagggtcacagaagtgcttttctgcacaggttgagcaggaggtgcaccgaggcacagtcttagcctgaggtgtttcttatagctaagctgagaattacgtttgattcacattggctggatttcattgcaggatcctggagtgcccagaaaacccaaaagaagcagactcaggctgcgatcagaagaattttattatccaagttgcaacatgcaaatatcttctttgcagtctgctttctgcaaacatcaagtgaaaaaaataagcaggaaaaatgagaaaaaaaaaaaaaaaaactggtacagttcatgcttcacaaagtcctgtaggttattaccatgttttaagttgtgagttgcaaacacaagctgttcttaaacaagaacaaaaagaaaaagcagatggtttctttttacatcctgtgaaacttttcctgaatataagcatatgttcccttctccccagctggcattccccatgcaaatgatcagtttggggttttttttgtttttgtttgtaattttgaggaaaattcttgatgcccatcccccatcccactctaaatcccataatacctagaaataagaacagggaaaggcaatcgccaaaatatttgatcaaagtaagtctttgaggcatcattgctgtgtagaagtatgtttgagcctaagtatcatcctgactttatcgttattactattatttttacattatgtctatttttctcaacaaacatctttcttggtactcaattgtttttcctatatgtgacatggtagaaaaatgtgagatttgcagttataaagacttggattcaagtttacttacttattaaatgactgttacctttgggaaaattattttaaatttattttaaaatatttttattctctgtgaccctcagttttataattcacaaagtggagacaataacatctccattttcacagagatttagaagagaaatatatataaggtactggaacaaggctgaccctcaataaatggttactattttgaactccgggcaaattgtataacctcgaaccactcacttctcaaaaatctggttcttcgaccagcagcatcggcaggattcagaagcttgttaaaaatcccaaaatctcagatctgctacattttgttctgcattgtaaataagccccctagatgattcttaatctcatttcagtttgagagacactgcactaaatcttatttgcctcattcacatatatagtgacagcactagcacttacttcatagaagtattggaagatgaaataagatagtgtattatttgtatagtattgcatgaagtgcctagcacatactaccttttaaataaatggtagttattattgaggtgttactgctttattggtggtgttgatctggaaatgtatatgggaacttcaagagccttgaatgggcttcagttttgctcaattatctgcattgttttaaaagagtttcccacagatgttaactatcatcctggcttaggtggactgcaattgtgtttgcttcactacacatcttagcagccaaaagagtgtctctcttgttactacttaaattcttcttgtgccttaagaggtataggaggaggagaatccaatgtttctgaacagttttgttttatagccagatacaactgttacagtcaaagcgctacttgctccaatattagttatctatggctatgtaaaaaaactatcccaaacttagtacaaaacaaaacaaaaagccatttaaatcatgcagtttgaggggatcagttattcaggagaagcctagctgggtagctctggcatgagatcctgcctgagatcgcagtccatttgatgaccagagctggaatcatctgaaggcttgactgaggctggaggttcagctttcaaggtggttcacacatgtgactgttagcttgaaccagcaatcagagagagacattgagaggtggaggagagaaaagctatagtggcctttataacctcatctcacaagtgacacaccatcatttccattgtattctattggtcacacacaccaaccctggtacaatgtggaaaggtactacagaagggtgtgactaccaggaagcagagattgctggggaccatcttgaaggctggctaccacagtctctggcccactaatttatacgaaagtagatgagtgtaatgaatataatgcaacctcccaattaatttcatatccagttcaacttgtctctcttccaagaagcttctctgccaagatatatttttcaatcatctccctcctataaatgttgacagcatttgttcacgctctactcttttaaagatgtcattttgctccatttttatttcacaaatgccagtctagtcaccttgagggcaaaagttgtgtcaaattattttaaggattccttaaaattttcagtatgtgctaagtatatagtaggtactcataataattatactttaaatgattaaaacataagtgttagctaaaaactaaattttgttggattaactggcttagattctacagaatggtcaaggcaaaatgtgattgcaatttatttttagtttcaccaataatcctatagaatcatttttaggaaaataggtcttgaaaagcacattctaaacattataatgcagtaaaatctcagtttacaagaatccaactaatcatactcagcagtttaaaacagaaccagaatctgactatctagaataaatttaccacataattttatccttagactgtatatatatataatatatgacaaaatagtattaggttatttatttataagatgggccaacaggatatctgtcagagtcagtgtaaattcaaacccacctctttgatctttcaaatatgtagcctggacattctttttaaaattgtcttgaagccttctagaactcttggtcattaaaccgcagcttcatgttgtctattatatgcaagaaaacatgcctattcacactgaatccttgcacatatctacttgatggtcttggccttgcctttccctttgctacaaccttcttcccctagatatccacccacagagcttgcctcttcacctcctaaagaacttcactcaaatggcaccatctcaatgaggcttaccctggtgacgatattccatgtggcaatcatcatttatacaccctcagcatggctgattcccattaaccatgcctaatggtttttttgacctagtacatatcaccttctaaaaatatatataatttactgatttcttatgtttattgtctttctctggaaagtggcagcttccccaggacagggactgttgcctcttttacttcccagtgtatcctaagtgcccgaaccagtgcctggaacataacgtatgcttaacaggaatttttttgagtaaatgaatgaattggaagaatcttttcacaatataatttgaaacaaaaaaaatctttgctggtgagtcttgaactaagtagatatttccttgggaaagactactttcccaataattctgattaattatggcacatcttttaacatatgtggaaagcaaatatattataaatggataaaatataatgtaaagcattttattttaaacatcattttcaaaattcattaaagctacaatatagaagttggtagagtttattagtcaagtcacttaaaatcacttcaggctatacaagcaactggcttgactgacttgaattcaatgactgaaatcaacgtttaactgaattgatgcacattctgttgatataaaagtacattaactgttctgaagctctaagtaatgataggtttttcttttttttttaactttatcactaaaactttaagtatgactgatacctgccttctgtattagaacatatgcaggaaatttacttttttttctcaaaatggtaattccaggagatgataaagccaatatattttgaaaagaaatgacattacaataacaatataactttgtaatcaaatattaatgtttttataaatgtttattgtgctgttaaattaaatgaattccatgcatgggcaaagtaaactatgtatattctgccatgaaagaaatggtaaatcaaataactgggtatttaacaatgatttatttattttcaacacttgcaatgtcctcattcccaaatccctagaagatagtttaatgtatggaaaaaatgtaaaaatgaatgaaaatgctcttatgacatgaagacttgtgtaattattggagtccagaatttacaaattacatcttgtggcgagtggtgtttagcttgctttgttaacctttcattcatgtaaaagctgaattaattttccctgaattacattgttctctttggaagattatgtttaactacttacattaaaattctaaacttctctcatgtaatacaagcaaaatacacacaattaacgcaaccacattaaaagactgagttgacatatttttaattataataatttatagaaaattcttgtgaaacttttttgactttcacttcttggatggcccctgattttgcctgtcaataaatagagaagagcaaggcagtatgctgtagcgcacaaaaaggtttaggtagataagtgtcccaaagagtccactgatacaatgcaagtccctggttaatgtgtgacagaagaatgtaatgctgggaagacatactcaatagtctagaactcctccaatgttaatgtagttcagcaaatatttttgagagcctataaattcaatttcacaatcttaagatccttttctattgaactgatgttgtgaatttgtcataacactgttgttagaagaaattctaaatttcttatcaatgagattgactttgatatgaccatcatctactcatccactaatgatgtagtggttgatgtcataagaaaaacagtattgagggctgggcacggtggcttcagaggtaatgacaacctgaccaagctctaagacaaaataaccgtttctgaggggatgccttctcttcaatattctaccaaccgtcacctaaggaagacaagttctgagtggcatggctacagtgtcagtgctagtgtcagaaactacagcacagggcagatagatgcattttttaagatcaccacaagtcaaggaaggacagaacgggaaggagcagctgagatcaccaaactctctaacttgatgcataagagaagtgatgcccaacaaacagaaaatggcttctccaaatccaggaattaagttgcaaaactggggccccagattttatttctgtgagaccatgatgcctcatgaacgataacatgctgaggaattctcagtcttctgtctctgcctttccagccagttaggctaaacccaagcctactatgtggccctcagttttcctgcatcaggatctctggtgtgtttgttgaaggtgcagaatcccagaaggcaaagtccttccacctgcatttttaacaaggctaattctgatgcatattcaagcttgatgaccactgctctaggcataattgagtcctaattcattcttttattaactcttttctgagcccttgttgtgagatgaagtatgttaagtactgtgacaaacccagatacagaaaagaacctttaggcactactaatacacttttctgggtttagattgtaaatgcatcatctgccaacaggattactataacttttttaaatcttaggaaaaaaagtatgtacatgtgtgcaagtgtataccaaaacacacacgctgtgttacaactcttttgataacaagtcaccaaatactaactggagcaggaatttattttaaagattactgatacctatagaccaggctggaaatcaacagggcttcagtaacacccagaatgaggaactcaaatgttgtgagaacgctgcctccattattcatctaggtctttctactggtatatgcttcattcttctcctctctttcctgccccctttcccctttcttcccccctctacaatgtgaggcagctccactgatttcctgttaatttcacttattcacccccattccctacaaacacacactgacctctctatttttcaaactcattgaactctttcttgccacaaatcatctgcattcactatgccctctgcctggcatgcactttgcatagcagctgctttctccatcattataattcagttcaaatagttactcttaagagaggacttccctaggtatgtactactggctatttactctgtgcaatgggtggctcacaaaatccctgaataattaacaatcggtttccatttgattatttatattctattccacggcttatttactttatagaatttatccaaacctgaaagtatcttgtttatctattagtttacccttgtaactcctgtcttctcccactagagtgtgggccccatgcagtggtgggctactgctagctcatacaggctcatgagagctgattgtcaaatatgaggaattttcgtgagctagttttacacttgaagcttgaaattggtcatggcagatatacttgcaacacggaaattggcaaatgctacaagtaaggactttttttaaacaaatttcccagtgagttggcccactagtacaccactggccccatgaaagcagagatcttctttcctttttccctcttgcactgttagcaccaggttgcagttagtaagttgttggatgagcgcatgcatgactattattactttagacaactccttttttgtctcaaaaacaaaattcaaaggaaaattactcatttgctcaacaagaatgaggtgcttatgcttgaacaattaactatttaaaaaggtaccagaatcatgttataactcaatgctgggctacacttagctagctgtggtgatggaggcagcggtaccatttctagaaaaaggactgggtaaagaaaaggaaaaaaaaaaatgattgctgcacttatttcttccactgaatgaggctcttcttgaggctgagatgattttgtattctactttgtggtccacctactcaccagcacgctctaagaatattatttatttaggttagaatgcaattatatattaccattataaagtcttatactagtatgccatggacacaaaaataaattcagaaaattattctaagacactccccactggccagcaagctctttaataataattatctgagaatagaaggagactccatttgaaaccttttttctaaatatttgcaaactatgcatctgacaatggtctaatatccagattctataaggaacttaagaaattagcaagcaaaaacctaacaatctcattaaaaatgggcaaagaggccaggcatggtggctcactcctgtaatcccagcactttgggaggccgaggtgggtggatcacctgaggtcagaagttcaagaccagcctggccaacatggtgaaaccctgtctccactaaaaatacaaaaaaaaataaataaaattagctgggtgtggtggcaggcacctgtaatcccagctactcaggaggctgaggcaggagaattacttgaacccaggaggtggaggttgcagtaagctgagaatgtgccattgcactctagcctgggtgacaagagcgaaactccatctaaaaaaaaaaaaaaaatccacatcccatatcagtcagaatggctattactaaaaagccaaaaagtaatagaaacttgtgaggttgtggagaaaagtgaatgcttatgtagtactggtgaaaacataaattagtttagccactgtgggaagcagtgtggatgtttctcaaagaactcaaaacagaactaccatttgacctagcaattccattactgggtatatatacaaaagaaaatcaataattctaccaaaaagacacatgtacttgtatgttcattgcagcactagttacaatagcgaagacatggaatccacctaaatgcccatcaatggtggactggataaagaaaatgtaccatatatacacaatggaatactacacagccataagaaaagaatgagatcatgtcctttgcaaccacatggatgaagctagaggctattatcctaagtgaagtaacgcgagaacggaaaaccaaatactgcatgttctcacttataagtgggagctaaacattgactacacatggacacaaagaagggaacaatagacaccagggcctggttgtgtggggagtggaagaagcagctgagtattgaaaaactacctatgcggtactatgcttattacctgggtgatgaaatcatctgtacaccaaaccccctatttacctatataacaaacctgcacaagaacccctgaccctaaaatacaaattggaaagaaaaaataaaagaaacctttcctctaaagcttccgtggtttatttaaggaaactagtgaatgtagggacactcatctgttgcctaaaccattaggaggatccctcaggccaaattcaacacacatgccctccacactccaatttgtgctaacaaatcacatattgcacagccttatgaaaaaatgagcattttttataaataactttattttgaatttttcccttgtccaaatatgtagtaataacaagggtgatgcggagctcttttataattctaccccttaggtgagagatttggaatagttgttaaaatctaattctctctgtctttcaaagagtataatcaaagtactgtgtctctaagtggctgctttactgcctcacagaatacgttatttgcctttttctccaaaaaggctttccagcaagtgctcttggtaaaacgatcttgacaaagttttggagagaagagtgatgctccaacataaaacagtctggaattaagcagccgagctgtattcacagttgctcttcacatttgtcagaaacgtggagctgattaaatagaggtaagttttctcctccttgtcccattgattgttctccaggcttggcccataagcaggtttttctgtgaattgtggtccactggaaaaatcagttaacataaagatacttggaagttttctcttccatggccccagagcaggtggaaacacttcacagcaatggcaacaatcttggaaggatagttttctgaaattcacctgcaataaactgcctgttaaagatggaaagccagtagggcatgacccggggatgctcccaccacctctcaggtctctgaagataagcgatctctcttctagttctggggcagtaggcatttgccattaactacattttctcaaacatatctggcagccaggaatcattttaggagggtgctataaattttaactcagagaaagaaacggaaatcatggtgttcagttactggtaaagtttggcacatattatcaagtaaatttctcaggcttgattctctagattgagagaaaacttgttctgaataaaggctttaaaatctagtactaagtcaaatgcaaaaataataatgtctaaaagttacgttctcttaggaccccattagacaaaggagagggtctcctgttcagaaactagctgtgctgtttaattttcttctccaccattgtgtttcatatccttttatttttccaataaggacaaacacaccccaagagaaaggtcagccaactcaagctgctgttctcacccagatggtgagaatcccagggtcacactagctgggacaatgtaaagattggagatgttccctctctggtcaccagaattgtcttaggcttaaccttaggccaagcccaccccaggccaccctaactgaatgacactctctcctgcaatagtaatcaggaatgaacattttcatggcagtcttcaaacttcactgcatatttagaaatgtctaagaccatcagagaattaccaatgctgggcaccccagatcccagaagcttctatttaattggtctgggactggactggacatcagtattttctttttaagtggcacagaacaagtaccttttcaagattatcagaataggagaaaaaactagactcaccaggctcactttgtgatgagccagctgtgcacatggacgggagggatgtctactcatgctggcactgtgtttgggtgcatttacaaagatagaggataagatatttcagctcacctgcaccaagtctgggacacattccatatacatggacacaggaacatatacatgagttgaaggggcctgctggggactgtggggagaatccacttcttatccaaagggccagatgagtgtcagctccaggcagtgatgccaggaggaactttggcaggttgtccaatgtttaggagaactgagaattggagttttctatgaaatctcttgatttcctaagcatccgctacaaacatacaattttgacaggttgcctaaaattccaccaatgagatatgaatctggatataacaaaaaatgtttcacctgcaagtactctcataccttggagtgaatttgctcaatgccactctgcattgagtaatagaaccatgtgggataataacaataggagagaggttattttgcatcaggagaaggggatgtttgctgagggacgctgggaagccagggattgatgtgtgagcaccgaatacctgaaagacaggcagagatgagattaacagaaagaaagggagaaataacaatgacactggctataagaataaacctaatgcatccccgccttgctggaatttatgtctttgaagaagaggcagacagtatgcaaataaatatatgccaagtgataagtgatactgaagaaaaagtagatagagcaagggaatagacaccggagagtactttcttaaacaaggtggttccggaagatctatttcttacaaaacgtgaaggacatgaggcagcaagccagtgatattcctggaataagatggttcctggcaaaggaaagaggaagagcaaagacccagaggtgggaatgagcctgggaagattgagaaacagcagtgaagtcagcatggcaggggcagaatgtatgagggaagagtgatagggcgtcaattcagaacagtgaggagggacagagatgtgcaagactctgaaccgttgcacagatactggcctttaagggagacaggtaggtgttgggggctttgaaacagaggagtcacatgatctgacatacttcaaaaggatcactctgcattgagaactgctgtcctgagaacatgctataggggactataggaaaagctgggagcccagcccagaggatatgcaataatccatgcaacgcagaatgcctccaaagtcaactcacgtttctgctggcagaatactgggaaatgcagactagggcggcaaagacagcagatgtccaacacaggcttaaccatcttccattaaaccgggcaattactgtttgccttcagccacatctggaaactaatagcggaagagagtatgacattctcagccagctccatcttaaggaaaagaaatttctccactcatgttgcaggggtctaagggtagtggaagtcatggtggtaaaaagagaatgatggcttttctccgtaaacagccacaaatgtttgagttatggataacaattaagccctaattggcaataatgtaaacctcttctgaatggatgtggtaaatattgaaacaaacgagctgctatttttcagacctggatggcagtcagtcaaaatgaaaagctaatttcagccttggaggcaaactctgtattttaatcaagtgtgacagagtgggaacaataaattggcatttaaggtgaggggctattgacttccctgctgcaatccttgtgataagttgcaatgccccccttgcaaaatgaaaacaaactatggctttgatccagagcataaacatctagggaactggccagaggcagagttcaaaggcagctgaaagctaaaggcaaatggtccaccttcccagatgtccagtgctgggaggacaccttgtgctatttggttgtcctcgcaattgccggccaatgtaattaatcaaaagtttctatactgagaatcatgaaaataaaggagggtgcgtgtgtgtgtgtttgtgtgtgtgtgtttgtgtgtgtgtgtgagagagagagagtgtgtgtgtgtgtactctaccatactgcaacacagcactaaaatctaattatgaaggatctgaaataataatttagtaaatgatgtattcaagaattattagctaggtgccaattacatccaaagcacggttataggcgccgaggaatcagcagcaaacaaagttttctcaagtaacttacattctagtgaaaataacagctaaaactttgagttttatgctgggggtctggactgttctaagtgtgtgtgcattgacatacgtatttttcattataatcctatgtgttaactacctttattacctctgatgtacaattgagaatgctgaggcacaggttcaggaatgaggctaaggtcacacagctatgtatgtctgctgggtacaatagtaagccaggcaatgacattgtcctctttaagcttcaggcctagaggggaatcaagcatgaaacaaggaatttcaagtgtttcaactgttaacaaaggaaatgcatggaattggggcaggggagggtaataagacccaatctagcttgacttttttttttattatagcaataaaacttgtattatggcctctcataaaaatgcatctgttttcctgaataacaagtctggctgatttgaggacaatagttggttttgttctttgctaaaactggcagtccgaaatcctaatttcctttctccatattcatgttaacctcccttccccaaatcctataaggatgggctaaacatggaagagtgagatgaatattttctaacacattaaacttctagaatcaaatagtgtatataatttatatatgtaatgttctgaagatttcgtatcttctgtgagtctgtctccatatatattatttatatgttttaatatttcaataaagccagtagggttcatgttactctgaatccctcattctaataaaagaaaatcagcttgtaaaatatttactttattaatcttaacatattgagggtactttattaattgtacagggtttaagggtatgattttgaaaaaataaaaagaaaaatcctgtccctgatagtctcaggtgctcaccaagtgacatgatgctatgtacgtgtataactcctgctctaattctcgagaggtgaggagatgtagagaattaaaaacaaaaagcaaaactgactttctcagtaggctttgttaattacctgaagaaggaattgtgagctttttcacattagtggggacaatcataacacagtaaaagctccaagtttccagatcgcattctccaaaggtgttttcgaatggctgtttaagtcccacccagaaaatataaagccatagaggagttcatttagccatgtcattaaaaacatttgggaagtcaatcagcctctctcttcctccatttcccgaactgttaatgggaacaataactgtgatctcgtctggatatttgtctctgcccaaatctcatgttgaattgtaatctccagtgttggaggtggagcctggtaggaagtgtttggatcatgggtggcttgggccatcccatgggtgacaagtgagctctcactctgggtttccatgggatctggttgtttaaaagtatgtggtgcctcccttcccactctttctctctctcattggcccctgtgctttcaccatgtgacacgcctgctccctcttcgccttcccccgtgaccgcgagctccccgaggcttcacaagacgccgagtagatgcctgcaccatgcttcctgtaaagcctgccaaactactttctttataaattaaacctcctttctttataaattaaccagtctcaggtatttctttttgtaaaatctaaaataaaattcagactgggcactttggctcatgcctgtaatcccagcactttgggaggccgaggagggcagatcacttgaggtcaggagttcaaaaccagccaggccaacatggtaaaaccccggctctactaaaaatatattttaaaaattagctggccatggtggtgggcacctgtaattccagcaactcaagaggctgaggcaagacaatcacttgaaccaaggaggcagaggttgcagtgagccatgactgtgccactgcactccagcctgggtgacagagtgagattctgtctcaaaaaaattaataaaatgtaatactttttttaacttttaagttcaggggtacatgtacaggatgggcaggtttattacaaaggtaaacatgtgtcatggggtttgttgtacagattatttcaccacccaggtattaagcctagtatccattagttatttttcctattcctgtccttcctcccatcctcccgcctcggataggccccagcgtgtgttgtttcactctatgtgtccatgtattctcatcatttagctcccactcataagtcagaacctgcagtatctggttttctgttcctgtgttagtttgctaaggataatggcctctagatccagtatttctttatagctatgcaaaaacaacttaatgtaaactgtatccatctcataaggctgatagttcaattagtcaatatacaaaaatccctagaacagtactcagcacaaagttgtacacacacataagttgctatgttgttgtcatgtaattttttttttttttctgagacagtctctctcacccaggctggagtgcaacggcatgatctctgctcatggcaacctcctcctcctcccgggttcaagaggttttcctgcctcaggcacctgagtacctgggattacaggcgtgcaccaccacacctggctagtttttgtgtttttagtagagatgaggtttcatcacgttgaccaggctggtctcgaacatgaccacaggtgatcgcctgccttggcctcccaaagtgctgagaatacaggcatgagtcatcacgcctagcccactttacatatatttattggacacctactctactctcttttatctgctaatgagagcaacaaagacaaggtctttacttgttgccatatactcttatagggaaaacaagcaatagataaacaagacaatttcagctttggttaatggctattcataaaatttaaaaaggcttatgagaaaggatgcctccctggacaacaggggagctacagaagcctctctgtgggggtgacatttgaggtgagacctgaatggtggagaaagtcttggccaggagaacatttagaaagaagtgttccacacagagaacagcaaaggcgagaatcttgctccaaaatatattagcttgtattgtattgtggagcaaagaagcccactggactggggtagaagggtgagagatgaagtgtcagaggagaacggggacaaggtccagacatgaggactggcgagaagttggcttctatgccaagtatgctgggaggccacgagacacttacagacttggaaacaacactcttcaacctacatcttaaaagacaactctggttgtttcagccatttacctaggtcgccagaggtaaacacatcttttccagacacagaagggagaatgtttgagggatttattgagaacgtaaatctcacaggtgtcagagctagaggaggcctctggaaggtgaagtccaacaccttcatcttatagagaaggaaacagcctatcttccaatacatcaggctcagacttgagagaaatgttgattgctttgcaagtgcaggtgttgaattaattcaagatgaggcctgaaagcataagctgcacctgtgttccagaaacaggaggaaccttgctaggttctttattaccctatggaaacaaatgggctgcttcttcctaagtcttcctaagaatatgtctccagcccctaccatcaatacttggtgtcaagcagggtcttgcatatgccagctgtgtgcagggacccacctgaacaaaggtgaaaaagaagaaaagaaaaatgcatcaggtctatgctccccaaattaagtctgtgcatgaaggacccagacatcagagtgcaagttcacatgccagttctgactgcattagggcattgggtcctaatcttatgtcatgcattcattaggaaagcacgtggatcttcagggtgaaaaaaggaaaaaatttaaaagatcacacccacattctgttactgcattgcacctcagaaacctgagcttggcagatgggagttaaaaagaagcgctagttgcctgaagcatgtcttaatttgttatgttggttctatttgtttctctttttaatggttcacttagccaaactggggctgggaaaaaaaaatcaatcttagaagatgcccaaactttttgaaaataattttgaattaaggaatctagagagaaatgagtttggatagattttactatttaatttacaccatctagaagattatataaatccagtgctggagtccccagcaggaagatgaaatacacagttggggcaccaacaaagccaggggcatttttttttttttttggtaagaaatacattgccatgttcaaaagtctaagtaataattatggggggaaagaaatttgttggacatccactcatgcttgtactattgattattctgaacttcgcatgaagtaggaagttaggtcataatccttatagtaatactaagggcttctaaggggcttaatctgaggaccgtcatagtcagtgggataatgtcagtaaagtgtcttgatttcttccaaagactatggttgataaatgttagcatttgtcctttccctgccttttctctaagctcattccacccattaatataacattattcaaaacttacatgtatttttcattttatagttttaaaacagtttgggggaaccatcatcctatgagatttttacaacaagcctgcaagggaacccacactaagaggctctggcaatgactggattgctcatggcgtgttagagtcatttttttaatacaagctgaattgccctcctccctcactataggtttcaaggaaatagggtgatggggaggaggaagttgtgagtctatttatcataaatatgagtaataagatcaattttatgaacattttcctatgacagagttttatgatacatattctctaagacacattttgtaattctggagttaacacatgtcttggggataatggttggagtcctaaattgagattaaggaagtctgtgtagtctaagagtttggtggctctgaaaaggtttatcttctttacatggactatgagaaaacaggagatgatctaacttatgaaaaagaattgagcgtaatgcaatttcattttacctgaaacctttgccccatatttcattcacaggttttaaatactctgtatccttctctatcttgtttatagagaaagatgctgcacatcactgtatctgaataaaaaataatttgtaggtcttcaggattgcttcctctttgcaaaatcccttgcctaacttatgattcctttcatcgaggctgagtcaaaaaaagatataagaatggagacaggagaagatagaaatggagatttcattttctcttctcaaaaagaagacaactttctgattccacaataggaggccaaggtgttatgaacctcattacacagataggcttaagtaattttcccaaaatctcatagctggaaaattaccacgaggggataagaactctgcctcttcaactccacatccggagccatgccatacagggaaataaatagtcccatttaatttgatctaatcagtgatctgttgaaagagaaagataaacgtccacttttttaagctgacatgatcttgaaactgcacttgaagtttggataggatccaagtgtggaaagcccaccccctcctgcatcagtcatttcatttttatcaaattgaaatgcagccattctttgccctaattatcccccctttgtcaattctgctccttcacaatggatcttcattcattaatgtatacaacactttttttattccattcaggcaaacaaatataagagtgctcatcaaatctcaatgctcttctgggaagtggagctaaagtgctaaaggtagggccaggcatggtggctcatgcctgtaatcccagcactttggaaggcccaggcaggcagattgcctgagatcaggagtttgagaccagactggccagcatggcaaaaccccctctctactaaaaatatgaaattagcccggcatggtagcacgcccctgtagccccagctactcaggaggctgaggtaggagaatcgcttcaacttgggaggtggaggttgcagtgagccaagatcacactacttcactctagcctgggtgaaagagactctgtctcataaataaataaataaattaaagtgctaacgatagtggccctgctttctagagttcatattctactgtcaagaaagaggtaagtacaaagtcaatgagcctggaaggacccaagatccttggacaaagtccaaggggttctctgatcagaggctggtgcttttacaagaggaatacagaagcctaggaaggtggatggacctcctccttgtcactttcttcctttgattcatctttttttgttctctatctttagagaagcaagacctaaagcagtcaatattataaaaagaaaaggaaaaaacacctcagaaatctttaatcaaacaaaattaatcccaagtttaaataactaaaccagataaaggcagagctactcgaatcgactagagggtggaggaatttgagttaatctgcttgttctctctgttttcgttttgcaaggggtctttggcagtggtgtggtttagaggtacatggagctgtgaaggcactggagagccaagttataaaccattgacaaccttggttagattttagacctagcccatggaaaagagcaaaaatgcctggtcaacctatttttaaaggaggcctttgttcagtgaagccaaaagactctaggcagctcagccagtcagaatttctctttaaggatatgggtcatgtatcttccacagagcatctcttttttacatcttcctctccttccaacatgggaaaactgtaggcaactggtgaagaaagaattcaatattcacccaaatatattttcatctcaacatggctttcatgcttggtattacatttaaatgatgactcattctaaaaattttaacataaatgatagacctacaaaacatgcatgcctattataaatttggtttactctcaagaggcttttgataagtcatgcagacggcttttagataatttcagtatctacaggtttaatggtctttgggaagagataggaacaaaatggaaacaaaaaggtaatgtgtaagaaatcaaccaattttttattctaattctggaaaaattttgtcgatttgttcggcatagtattactccacctccccctatcctcagagaaagatttctaagaactagattttaaaactaaataagtctggattcaaagctcctcagagctctaccaactgtcagctctgtgacctagagcaaacaatttaacttctctttgcttaatttgctcaactgtaaaatgggataataacagcaatgacctcatagagttgtcacgagcactggatttaatgagataatgtaggctaagagctggggccagggtctagcacatggtgagcactcaataaatggtagctattatacaccatgtgtctattttattgttttttcattttgacacttcctagcacaggacttcaaatcccttccgtgctctagaatcaatcaactgtttgggggtaataattattaagcttaatatgcagatgtggaacagccaagtaggattaaacactaaccatgatcgagccttgggtccaccagatattttcacacaaattatcacctttaatcctttatgcagccctatgaggtacgtgtggccaagtggatagcagagtgggaacgagattgtgtgattaaatgctgagtcagaccgtgtcaattcaaattctaactctacttcctacacgctacttggcttttgggaaataatttctttcatcaaattccattttgctcaaggaatataacaataattaaaaggcataatgcaagcaaacatatcacatggttcctagtacataagtatggaacagtgttcagttttattattgtagaagctcttttaatcaacctccacttaactgacatgacaatcgccattccttcaggaaaacatagtgacttattcttactcatccctggatctctcatctttttgcacacctgtgcttcccccaggtaaattctatataaaccaagatcatttatggttgcttatttcacttgtacctattattgaaagtatatcattttgttaaactttacataaattattgaatattagtgcaaaataatttttctataaaaattaagttaaaatatttggaaagatagaaaagagactgcttattttataaggcagttgaactaggtttaaatagaaaatcatataaaaatagaacagtcatgaacacatctaaaaatcatccatagacattgcttcacaatatgtttttaaatttcctcttaaaaaagaaactgggaaattgccaacatgtgtcatgggtatagcttacataagaaaggtgcagaactccaataagcgaacgcacactcaaagaaaaagctctcgccttacaaaaagattagcaaatgaatgaacaattacatgttttaatataaaacaactcccactatgttagctattatttccatctaatagatgggagtcacgctgggaagaattacggctcccaaagatgtttacagaccctagacagaacctgaaagattcccctggagaaagctggaatttagatggaggatcagaagacaaagttaaataaagcactacgtcaacaaagagccctccctttgtagaattgcatgcagtgctaagaggctcatttcggaacacggttgtctcctgttcaatacatagcaaatgacttccttacatcctcttaaagaaatgggaaatattgagtgaatttatctaacagcccacacactgagtataagctatttgccttgtgttattatgactatgaattttgcgtaccttttaatcactgaagtctccaaagcaactctccaacttcaaattcctttttatccacagttctgctgattcctttagatctcccaagccttcttacaagactgaatatattactcatttataatacagtatttaaataccctctgtttgatttttttcctgctaatcttatcttaacctcctctcctgaagtaccacccacctttgcatttcttaaatccagcatatacctaaatagattgaattcaaatttccatggtttcattgagaaaccatattttttttcaagcacttagtttagttatgggattcaatacaaaaatccctaggcagagcccatctcctccccaaagttgaaaacaatagcatttgttttattaatatttaatatttagtgtgcaccagccaaatatacaatgctgcatcaacttccactgttacgcgctgtactctcatgggtatttccaatctaatgatattgtgatctgcctttcttccacatcaatttatttatcatacttggcgcaaagcctagcattagctccaaactctactccaaggggcaaatccctttttctctggcaaaggttttttaagaaagccaagaggggagatggaaaaggctataatttcctatttgtaagttgatttattttttagccaaaatatactttaaaattcagagttctcattttttaatcaacaggtctttcttatctgtaccaatatttcttcatctgcttacattacgacttgacttctccatatcctctccagcagtcctcagagtaaagacatttaatttcgttaatggtttgccaatccttgtttgcagcataagtgcaaatatttatctacgatttttcctcttatcttcccagtccagtggcaccctcccctccccctcatttgtgtcccttgtgccttaggaaagcccacaacttctggggttttgtcactaagtgttgcttcaacactagatacacttggttttccagccaggaggtaacttgtgccacatctgcacatgtatagtcaagcactaagccacaaatttgtgcttctacttgctctcttatgtgaaatccttctcatttctgaaagccacttttactgacctggatagacactatttatgattttcacttctcaaaactaagattgaaaataactcaagaattatctattaaccaacacatcccccaacttacaaacttaaaaaaaaatggatccagattgatccattctttctttttttctttattttctccttcccatttgctcatcctttccttttcccttttatccttcttttcattctagaaatatctactgggtgtctcctttttgccaggaacagttccaaatgctgaagacacagtaaggtataaggcagggggtctcccatctcacaggacttacattctggtggaagagatgggcataaaacaacaaatttagtatttgtttaggactgcgataaatgccacttaggaggacaagataacatgaaaacctattaaaaaggggcctgatccattatgggagttgggtgtgctccttaggggatgtaggtctcaactcggcaaagaaagatcaagcaggaagaacatccaggcagaaggaagggaacctgtgaagccctgagatgcaacaggtcttgatccttctgagaaactggaacaactttaatgtatctgtgtagcaaatggcaggaggtgagaccagacgggtaggctcaaagccagtcactaaggttaatgattgtggattttaacctaagagcaaagaagagccacctaacagttctggaaaagtccctttaattgctttgtagaaaaggagccactaattcataaccaccagataacatataagaaggcactgccacctgtagaattctgtgcacctactacaagagatgacagcaatggtgagacagtgtcatttttcctcttcaggacccatgacaatgactatttctttaataaattccctgggctggaccggagaaattgctgactctgaaaccctgttcagccaagagtacagctcgatgtaatggggactgaaagtcactgttgattgctccatatccttagtaaacaagacacaggtctttcaagacagcagattactggatgtcaaaatatgcccttttattatactttcgtttttgttcacaataacttcaaaagtgtatcccccactactaatggcagaagttcaatcactgcacctgccccacccaccatagagcttgtcctccttgggaggcattgatagcaacagagtcagattgaagcaaatggcatctagggacctttgaaagagggtctttgttctcctacagcaaatatataagcaagacaggtaaagaagggttattctgcaaaataacaaatatggtcaaaatgcatatgaaaaatattcaacctcactagtaattagggcaaagaatgttaatacaggaacaagacagcatttgtcggcaagtgttttagaaaagatgaaaaataaatgataaactctgggccacaataggtatgggatcatatatcagtagacattttctcaggggccatttgctgatttgtatcaaatcctcacaaatgttcatttcttttcatatacaaatggcactgctaaaaatgtattctaaagaaattaagatgtgctcaaatatgtatttacaagggcaattgttgcagtgctacttgccatagcaaagacgcagtgaatatcctgcatgctcaatattaggttaaatgaaatacgatatagtcataggatgagttagcatgcacttattcaaaatcatgctgtaggtgaatattcattgcagaagtgttaacaatactaaaaaggagacaggctataaaacaatatgcataacatgatcccatttcatataaaacatgaaaagaagagacagacgaggctgggtcagagggacatcaccaacatcttgccagtacccatctccaaggagtgggattatggaagattcattccctcatgatttttcagttgttcaaattttcttagatgagtctgtgttgcttatgtaatagatctacttaatactaattgtttcaaaggatgtgcagaagcatatccatctgtgtatttccagcacataggatatgcattcattaaatgtctactgaacaaactcaagatattcaagagaagaaagtcaaaaattgcatgtgtgtgtttgtgagtaaatagttttattctaattgaaagcttgcgatgttctataaacataatatcattccatgaggattttgtaaatgctgcctcattataatgtatgtatatattataacgaacatcccagcagagggaagggatgtgtatgtacacactgtgtagatttgggaggaaaaaaaggagattattgttaaaagcaaataaattccagattgaaaatgtaggcttctcgtaagagataataataatgatagtaatggttcaatacattgaagagcacttatgaatgcaaattcattttcaagttctttcacattatccccagtactttgtaccaggttaaactccttaggattctggctgcattagcattttctctttacactttcaaataaagaagtatatatgggccagttaaaattctatcttctccaacaccacatgctctcactcctatgcagaattttaaacatttgatatcctagaagtagagtagaatggtgtttaccagggactggggcgactgaaaggggagcagttggggagatgttggtcaaagaatacaaaattttaattagctaggataaataagttcaagagatctattgtacaacatggtggctacagttactaacaacatgttgtatccttgaaaaatattaagataccacaaccttagtggtaagctgtgttctcaccacaacaatggtaactatgtaaaatactgcatatgttaattagctagatttagtcattccacaatgtatttaaactgcaaaacatcatgttgaccaggataaattttatctaatttcaaaaaatttttaagtaaaattaaatataaataaatagtttatcttcaaatatctaaacaactgcaaacttctcatccacaacttttcaaggatttcagtttcactaggtgcttagaaatttctaaaatctatttcatatactaacttcttccgtttgaatagaaacccaatcaaccacaactatcaaatctaagaagaaaattctacctaaggtctagcacaggggggttgcattgaggtccaggccacagagagaatgggagaaagcatgtcagtgacagcttagaatgcctggaatcacactgtgcatttataattttcataggaagtataaactaaaagatgttgatgtcacccaagtgaacacagttgttagataagcattccttgaattaatccttggaacataataaaatagtaaaagataatagtcttttctcatgttgtatttttgcttaacaaaatgaatgataattgtgagcttttatctgacaataaaggttactgcatttctcactcaaattgagcattaatctcactgggtgtcttccccccttcattccccgcaacatatatccttgtgctttccctatctctaccctacttctgaatacccacaaattaatgttgactagatgatgaaaactctttccaaaaggtttgcaataccagcaccttatccaaggcttaatctcgtacattaccatcacaatcaaacaattatctgaacacacctcagatgctttctacaaatcttttcaaatttctactaaatagcttcattatgctgctttcaattcacaataattaggcagagttttgcaatgttacctattggcctcattttttctgcttatgtactaaagaataaattcaaaacagatctctgaaatgaaatgatgcagcttaacagtcttcaggtataaactgaaggcatttaaactgatgttatggccctaagcgcctttttgcattaactattgacatatttgtttcaaacttgctttgggtaaaatccctcattacaaggtttggctggatgtggccagggtaagagaatctaacaaaacctgtgacttgaagtcagatctgagaggcagtgaccacaatttaggaactacagatgaacttgaatgtcaaagctccatgactaaggagggtggtaggagtctcaattaaatctgtaaatatataagctgtaaatataaaatggtagcagttcctacagtgctattgtgagaagaaggtaacatgaatgtcaagcttttagtatcgtacctcacacgtggagttcaagaaacattataatgatgatgatgatttatacacaaaaatcatcttatttctcagaagaagaatctcaagctcagatcttttgatttgcatctcatcgctctcttcaaaacatcccaccacctctggttaaaaatgttcattgtgtgttttagttttgagtacgtgtgcgtgaatatgtgtgtgtgtcatatatatgccttcatactaaatttctctcctccttgttacaaataaaatgtatacttatggttatgctttaaggtctatgatttccttatgttaatctcctttatgataattgtagcttttctatctgctaaataaacactgctctaaacactccccaggtaataagcttatttaatcctcacagcaactgcataaagaagatactactattatctatgttttacatgtgaggaaacagacacacaaagaactaggcaattaaccaacatcatcctgttaaatggcagaggctcaggtaatatggctctaaggtttatggtctttcatcattctccatggcctctgtaaaccagtaaactcagaaattcagtttggaagtgaacctatgcttgaggttctttgctggggctcttgataacacaaccaccaggcagttgtcgatgccagcaatctcccgggtacctactctttgcaacatgctgtagtcaatgccttataagaaataaggcgggacctgggctgtggaggactgttttcacctaggaagtaaagtaacagagtcctctaacaatgatgacctgtggcaaaaatgccaagggctattgaagggttctgaaattaagtacaacaggaattttgagaaaagagtcatgactttagcagcgagcttagggggatattgctttattttaaccagtttcaaaatggagaattgagtcaagcaatattaagaaaatcaatgccacccctagtttgaagttaagctgcatcagttcatttcattgtcctgaattgtctggggtgagcagattccttgatgttatgtattcaccacggtagaataaatggggaaactgggtgatgattggacacaaaagagcaagaatacctaactcatagctaagtgcatagatcttttaatcagatacaacatcttttaacaaagaattgtatttttcatctggcatataaaagactctaaagaaaaatagatttccttccctgtggatttaaggattctgagttatggaaaatttaggagtatggcaaatccctgttgcacctatatagtcttccaaacaaacagggattcaaatagattccaggtcctcaggagttttgatttctctgagatccaactaaatgcattattataatattattattaatacatcaaatgcactgagcagctatcacgtgccatacacacaagacacctcaacataattattttccatgattgttacaacacagctatgaagtaaagattattattccctataaatgaagaattgaaggccactgagctcagtggctcacctaaggtctggcattagtcaatcagcaaagaatcacagctctaacatggtccagacggaagaaacttaacttgtgcaaaaagcagccagggttgttttaaaaatgaaagtactcactgaaaagtagctcccaaaaagtagcccaattttctttcaaatcgaataattgttctaattgtgttttcttagattttgcattgggcaacctatcatcacagggccaattatcttaactatgttttcttattttctgtcttcttggtgctctggcatttggggaccttatagtccgagggtgagactggccccctcagggttagctaattcttttcttgatttttttatttattgtagctaattctcaaaggcaataacaactggcctgaaagtgaccctctgcatacaaatcagccaaccccgagtctacagccccaaccgcttccttttctaactctcccacaccaagccaatgtttcccctgccctacgtcactcagggtcaggaaccagacagctagagaccactgctggagcccagagcctgcaacattattcaaactggctaatcctaaattgcttactctgccctgcccttcctttctggcagaaaccccaataaaggctgtggcctaggccttctcactcctgcttctgcgtgatgtggtgtgtctccctctctcaggaaattaaatacacaccttctttcaatagcattggtctctctgtatcaccacttagtcacctccataaattaaaatcccatgggtataaattttagaacgataacaaagggagaaataaaatgactttattgccaaatcacatcatagaaaatcttatcttggttgaggagagctgaagaaaatataaccatgaaaaaaaatctcagccaggcacagtggctcacacctgtagtctcagtgactctggaggtggaagcaagaggatcatttgggcctaggagtttgtgtccagtctgggcaaaatagggagaccctggatctaaaataaagaaaaataaaaatgacctcttatgttcatatgatatagataatcagcagaagtgtgtgtgtgtgtgtgtgtgtgtgtgtgtgtgtgtgtgtgtgtttaaaaagaacattgggaagggaaatattcaaacaggaatgtggacatttattaaaattttttgtgggtgaccgttttctaaataaacttctcacttttttaaactaagtttaaactcactttaaattaattttagttttcagaagtgttgcaaaggttgtacagtgagccgtgcacaccttgtatccagagtcttctattattaacacatttcataaccatggtacatttgtcaaaacttacgaaaccaacactgatacattaccattaactaaactccagactttattcctgtttcaacagttctctcacgaatgtccttctattccaggatccaatccagaaaaccacattgcatccagaaagcatgttttttaatgtcaggtagtaggttatgggtctgttattaaggaagcagagaatctgctttgcacctatttggaaagactaggacagggatgtttctcttcaggtcagaagaaacgagctcatcatctttaagtgacaaagtattcctacacatagtttatgcttagtactcccggttcgatataaacaagatatctagtgtgacagaggaaggatcctccaaaatttaagtaaacaggattctgtatcagaggcgaaaaaaaaccaagcatgggcagtgagcccaggaacaagggagcaatgttggatctgtctccgggttatgcattgaggtttgtgggtgtcatggccgaggctctcagggagctccaaggcagtcgtcaacagacttcctttggcgattactgttcatcaactacagggagggatttgccacatttagctccaaatgtgggcaaaagaaagaaaaagtgattctggcctgttttattagtctgccacagaaagggattttagtggagaaaaacaatgcagacgcagaaaaggcagtaataaaacataaataaataaaaaacaatgatcagaactgaaggaagacttgaatttttaaattgaaagagctcacagaattctgggcagaaatatttataaatctgttcatctgtgacagcattttaattatttttaatcctgaggactaaggaaagaatgctgaaaaactttttgcaatggaggactaatactaactattcacctgacactaaatgctagaagacaataaagcattgcttgaactaataggggaaactattatcatccaagaattttgtacagaaacagaatggcaaaataatgacagcgatttgtggcaggcaaaataaaagattaggctgggtgcagtggcttatgcctataatcccagcactttcggaagccaaggctggcagatcacgaggtcaacagatcaagaccatcctggccaacatggtgaaaccctgtctcttctaaaaatacaaaaattacctgggcatggtagcacgcctgtagtcctagctactcaggaggctgaggcaggaaaatcacttgaacctgggagacggaggctgcagtgagccaagatcgcactactgcactccagcctggcaacagagtgagactccatctcagataaataaataaataaataaatgaaagagtatattatccacaatatgcttttttttttttgtaaagaaaggttattcaaggaggtactccaacaaaattattatgacagtcccaatgaacccacaagaaaaccaaaggctcagtgaacctggcattctggtctcaatcttggcttaaaccctaatcacaagttaatgtgtttatgtcttggggcctcctaataagcccaagtgtcttctgatttgggaaaagtgtcaggggggtcacacgtgggctacattttgacatgtccctgctctgttatgggactactgacttaacaaggtccctgcttatgcacatgcaaaaaccacttgggcttccacccaagaatatccataccttccttcataagaagagtaggccaggcgtggtggttcacacctgtaatcccagcattttgggaggccgaagcaggtggatcacctgaggtcaggagttcaagaccagcctgaccaacatggtgaaaccccatctctactaaaaataaaaaaattagctgggcgtggtgatgggcacccataattccagctactcaggaggctgaggcagaaaatcgttgacccaggaggcagaggcagtgagccgagatcgtgccattgcactccagtctgggcgacaagaacgaaactccatctcaaaaaaaaaaaaaaagtacttatcagtcattattgtcctgcatagtcatgccaatatgtatgccagtttacaagacagttagaaaatcaaaacaagtgtttatttattggagcaggaagaggggagtgaagcagctaggacacggaattcaaaaaggctcacactctagggtcacacaaggaggggatgggcatgctgagggcctcgtttaattttgtgcccaagtgcttcacttggctctgctattcctgaacctgataattagtcttactaataaaatcaggagttgattggtttaaaaaagtatataaaaaacccaattgatatgtttgttgtagtaaaaatttggaaacaacctaagtcaataaggtgattcctaaataaattatgattaatccatacaatagaataccaagcagcaatggaaggagtagtgttgatctctatgtactgacttggaaggacatccacaatatattattatcacaggtgaaattgcatacgataggacactgttctatattaccaccatgcactacaaaaggatgtttgaatcaacgatggacagcatatacgacagcggtcccataagattataatgaagtggaaaaattcctatcacttaatgatgtcatagctgttacaatgttgtggcacaattacttctttaaataatttagggcgggcacagtggctcacgcctgtaatcccagcactttgggaggccgacgcaggtggatcacttgaggtcaggaattccaagccagtgtggccaacatggtaaaaccatgtctccattaaaagaaattactgggcgttgtggcaggcacctgtaatcccacccactagggaggctgagacacaagaatcgcttgaacccaggaggtggaggttgcagtaagccgagatcacaccactgcactccagcctgggtgacagagcaaagactccgtctcgaaagttgataacaaataaatttagtttagcctaggtgtacagtgttcataaagtctacggtagtgtatagtcatgtcctagcccttcacattcactcatcactcactcactgactcacccagagcaacttccagtcctgcaagtgatctataaaggcataccatgttcatcttttatatcatatttttgctataccttttctatgtttagatatgtccagatacacaaatatttgccactgtgatataatttcctgcagtattcagtacagtaacttgctgcagaggtttgtagcctaggagcaacagccataccatatagcctaggtgtgtagtaggctgtaccatctagatttgtgttaagttcacctatgatgttcaaacaatgatgaaatcacctatgatgcatttctcagaacatgtcattaagccacacgactgtatttgtagaaaaaaatcagagatacatttaatcattgagatagacatatcctcaagctattacaatttagttctacttaataatttacaagctcattatatttatgtataattatattcatctgctaatggcagagatctaaaataatagtgattaaagccagatacatttttcttatctctctcacatacacaacaattaagaaatcagaatctctatggaagtaccccattgtaccagtattccaggctccttctgcctttcttcttggcaatttagtgacttctaaccctttattcatcacctgcagcaagacagccactgtaactttaactcgacattctttttacagatagaaaaattagggcatggggaaaagacatattttccagctatgtcagctaagctttcctgaaaggtccacccaaattttcaatttatatctcattgtccaattttatctgcaaaagaggctgggaaatgcagtttttaggcctgcaaaactgctgccctcagtgatacaaaggctcctcccaagaaagaagaagtattgtctgtaggtaatatgagcttaagtaatgtgagattgttttcacagcgaacttgtattactttcatatcttttattataataaaaattagttccctgtaatcccagcactttggaaggccaaggcaggcagaccacctgaggttgggagttcgagaccaacctgaccaacatggagaaaccccatttctactaaaaatacaaaaaattagccaggcatggtggcacatgcctgtaatcccagctactcaggaggctgaggcaggagaatcgcttgaacccgggaggcagagtttgcagtgagccgtggtggagccattgcactccagcctgggcaacaagagtgaaactccatctcaaacaaacaaacaaaaaagttccgttttggaaaaacagaaaacagagacttaaagatagcttataaatgcctgccttaatggggaggtctgaagaccttgaaatggtgatttccctttgctataatttaaagcactccagacatgtctctggccatctgtcttcacccccaaccctgacatcctacaaggtcccagtgcctcaaagtcaccataaaccaccatcactaaagatctttgggggaatctttaagaaattatggcaaatgaaatctagggaaaagccttggaaaacaagagaacagaagctctcaaaggaagggcaggacgtttggactaccttttacaaaaggcaggtcaactatgagacaatgtaccttgtttctcaaaaaaaaaaattaattagacaatcttttttttgttccaagatgcattagatgaaacgttagatcctgaggatttcaatgtttgttggttggaaataggattccttggtcaaataagctggagaaaaacctgacttaacatcgctaagccacgtgtttactgctaaatttctcagaggccttcatcggttaatcacgagcattgtgatgcttcaaggggtggagggatgctgctcttcactttccccatagcgctatttcttcatgcatgatacatattttgcaaggttactctggcgaattagatagtgaagctaatacaagtgtgttcttacatttaaaaaatacttttccacctttttagttaatcaggcatcacacggaggtgtaatgttaggataattcatcattattctttacattacccctctgtgacaccttacattacaccccagtgtgatgcctgggccaatgaaaaaaatgagatgatgctacaaagtcaagatgctcataatgcaaagaccaagtcatttgaaattgtttcaactcaagtttacaccttggtatcatcaattattggtggtgtgaccttaaccaagtcacttcactttctgagcctttattctttcagctttaaaattagagaactgccacccatacatttttgctccttaaagaataaagagggtcgggtgcggtggctcacgcctgtaatcccagcactttgggaggtcgaggccagtggatcacgaggtcaggagatcaagaccatcctggctaacatggtgaaatgctgtctctactaaaaatacaaaaaattagtcgggtgtggtggcgggcacctgtaggtccagctactcgggaggctgaggcaggagaatggcatgcacccaggaggcggagcttgcagtgagctgagatcacgccactgcactccagcctgggcaacagagcaagattccgtctcaaaaaaaaaaaaaaaaaaagaataaagaaaatacattatgcatgttttctagtacaagatctagtccatggatatactttctttgtcccaataaaatagccagacattcaaatcctagatctctgagcttttctgagactcagtactcttctctttaaagtgggggtataatacctacatagacaggtactgagaaaattgtagaagatgatctgtgcagcttcttataatcgctcaatacaacctagttcagtagcacccttccagtgtctaacatgtgctggatcttcaccaagcatttgttaaacttaagtgagtcactttgttaattataatttaccccctccccaaatggctttaattctttggtcatttggagtttaatgaatgggctctatgactcgattttttacaacccttagcagtacaagcaaagccacccaaagatagaagtgatttaacttaccaaacactttttccaagttttgctcaatatctaaactattgcaattgtcagcaaaaccacatttacttacctatttctcagtgcttcagagacattcaaaacgtactgaattcaacaatcatttgagactttttttctttctctacgtaatttcattgctgttacactgtcttcttcatatttaaagatgaaaaagtcctcctttttattcatctttttattctgtgtgatcgatttctccctccacataacaataattttgctttctagttctgtagttatataaaccaaagctgcttataaacatgcagggtttattttatttccattcatttccattttaaaggactggggaacaggaacactatgtcatcaactaactgtccgagtgcaatgatgagattgccatgtggcatcccagtcccccagattttcaggaacttgggaaataataacacaaagacatcagcaaataaggcagaagagggattcacaattgctgtcttgctttcctgacataattcatttggtctcaacaggcatgtcaagagaacattttggaaatgaagggacatttcttttgattgtcacagtggctggaagatggcataggccatgactatcatttgcatggtggggtcccaggatagtaaatttctttgttgcaaagagcaaaagatgcacttgtattcttaatggctttgaaatgtctccatggacgtcatgtaggagacaaatttgtttataatcttgagcctggaacctaactgaatgtcacataatgaacataaagtatctgttgcacagttttaaacactcaaatttccagggggctaatctctgagtaaattgatagatgattttattctgtttgattctgagcttctctgagtctttcactcatcattttggaaaatcctgggattttccaaatacaacaaccaacacaacacacctgtattagtttgcgtttggagttgtatagatgtgtataaataggaaattctatatgtaagtgcaaatatttgattattacatcttctaacatggtcaagcctaaatgttcatgtatcaaaatgcacattttgtcataaatcacaatagttttctcttatttctctttcatattatgattaggacattctagttttacattacatggtaaataggttataacacccatgaattttacttcatgagaggaaaagatatatcatgaaatatttgttataaacattggcattggattggatatacaggtgtagtaaagaaataatagtaaatatcaatgaatgccaatattccatgcctttccatgtacttttccaataatcctccatactctgtgctgtagttagagcaagaggtttgtttgtgagctcttgctaactggagagggaaaacattttttcatgactacatcatgtggccctataaatcaggaaggcatcaatttaatacaagttcattaagcatgtactaagtgcaagacatctttctgagcaacaaactgaacctatctcctcaccatcggatttcacctaattgtggtcgaactagtcctttgaagaactcattgcaaaccaggttaaagagatgatggttactcaatttaacatttccagttggcatggagtccattctcattgcaaccacgtcactacaaagtatttttaaatgaaacattttaattgtattttatctaaattcatattttatcttatcttattgaaacatttttatgcaaagtcttgttagaacattgtttttttcgaatactcttcctggattttttttcctttctctaggagcgttctttttgtgcaagtacttagtcatataataaatatttttgatttgtagtagcctgcaggacataaaatattaccagattgcaagcccaaagtgccataaaagttttaagaatttggagattatttagtaaattactgacacctatattgtttgaaacacttgcaaactcaaagtgcatatttaaggagaacgtctgctgatgtggaatctcttaggcgctgacctaccggttgctatgcaaccttatcttcaatagaacaccctttgaaatcaacagaaattctgctgatttaaggagataggactatgcctccaatagtaatgtgtctgctgcaggtaccctacctctcacagaaggactccaggacacacaggctgactacaaagtcaggcatccaggccaagtgaataggtttattcttctgcttctaacatgtgactgatgagacatattcttttttaagggaaacggcgtaactacaaattcaagctttagacccatgggcctttcaaagtcatattaccataaatatctaacctttatccacgtatagggagacactgatatgattaacaagctgaaataaagattagctctatcttgcacaaatatatctgccttttgacaaagcacctcaaaaggttgaatattttaaaaacacagaaagatgctttctgacctcctaactaaaatagctgctgcttcgacatcattgctgtaacacttcacccttctttgtgtgtgatagtacttataactctcaatttttatattaaagacttgttcattgtctccctgcgttcctgtccaggaagataaggtctctgacaacaaagatttttgtctgcgtgttaatttctatgtcctcagtgcctacccacaatgcctgatatagaacagtaagtatttgttgaataaatgaccaaatactcctttatcttaaagatcagcaggtttaagctgaaaggcaattataaaataaagcagataaataaaagaatttatggaactgttaaatatttgagcatattatctgagatggtgtgtgtaagttatacagtgcccaatagaaaacttctgggccgggcgcagtggctcacgcctgtaatcccagcattttgggaggccgaagtgggcggatcacgaggtcaggagatcgagaacatccggactaacagggtgaaaccccgtctctactaaaaatacaaaaaattagccgggcatggtggcgggtgcctgtagtcccagctactcgggaggctgaggcaggagaatggcgtgatcccgggaggcggagcttgcagtgagccgagatcgcgccactgcactccagcctgggagacagagtgagactctgtctcaaaaaaaaaaaaaaaaaagaaaacttctggattttgaatcacactagaatctccagtgtccttataacctgtgggaggctgatcaaaatgggtgttccttgcatccatcatcttttttaacagaaacattctgttgataaagcatagtgttttcttcaacttcccctatcaactctttgattctaggaacagcaattctcagaggtgaattaccctgagacacagagggtcttcgactgatctttcatgccaggctgcttcagaaacgtcatgattattcattaggagaaggcataggaggacagacagagtccgtggaataattagaaaatccccaccttcactaatacttgtcctaaaagtgggatcttatgctttgggtggagacagttataaatgcaggtgttccaatctctttttgcattccaacggtgaaatggtctcaggtaggacagcgaccctttagatgcttttgtttttattagtctgtcttagaaataaacttgctgtatcttcaccttacacaagacccttgcacattgattagtttgtctaatataagactttaaaaacacgtaagcttcttcaaagcattggtaaaaaatggtcagccagaatgtcattggctctgcttcatttgtacttggagagttaagagagtttatgattttagttaataaaatgactctattttgaaacacaaattatcagagcagaacaatttacccagaaagggaaaatgttttattataaaaccataacattctattattgtttatggtataaaaattaaaagaaggatctttacaggaggaaaaatatctaattttattaaaatattttattagaaagtaatgttctattttaaaatttgagctaggtgctcatgtgatatgaatcaaattataatcaaacatcacattttttaactaattggactccaggtaaattataaaacaatttcaatgaaatgcaatttcagtgctctcaagtaccttaataaacagataagatcctccctggccaaattcctttatgtagcaaagctaactctctttgaagagaaacaaacataaatgttagtctagccaaggtcagattattatgaacctcaaattcatgaattatgactaaatctgtttttacaatgtatttaaagttcccattatctttaagtaaggttcttaggaggaaaaaataaaataaaacaatgtttagtatacttctctttcaaacttcatctgcctgagtacaaaatcctcaaattatacttccctgctgcgcttaaattacaatttggggtttagtacattttgtggctaatatcaacatatttataatattttcactgtcctgctatatgttaggacatatatatattcctatgtatatattcttctaatatatttccctttaaatacatgaatctaagcattatataccgactgtttcaatgtttattacatgtgcattaatagaataaacttatctaaattgggctcttatttgaaaaatagagcaataacaagtgaacagttaaatgaattacccaccaaatcttttctgtgattgaccaattaattgcacaattcaagattgctgcctggtaaccctagatgcatcctctgtgagatttctgtgcaacttgcacattgtgaggggaagctgcatatccaagcttcccttccttgtggattcctttgaaaatatgatgctgtataaacccccagcaaacaactataaatctggtaaatgttcactgtgtctgtgaagatggaatgattctccccagacaagctttggaaaataatgtattgatttctgatggcaattcattgttctttgcaatcaacagtgcttacactgtggccttaaattatggcccttcctttttcactcctggtcttcggaatgtgaaatcagagagccagaaagcttcaaagaggttacagcccaagtataaggaatttaaagttatttttagttgtaaaatgtctggtcactctggtctttttcagtagagtcactttaattgacacagcattaactaaatgttaagaactaaaccaaaatacctctgggccctttcaaaatgaactaaaagcagttatagttcctaaaatccactcttcttgcaacactggatactacggtcacccaagtggaggcttggatgacttgacattataaatgtctcacaaaagcatgtgcacttgatttaggtctgcatccagagagagagagagagagagagagggcattgtatacattttctttgctctgaaagagtctcaaaaaattgtttctgaaatctcctatacaccagcctgtgcacgcatccacaaagtagaagccactgtcctctattacctgagatcgtgcaaaagaagaactactctcccagatacatttttttttcttgcagttttaggttgggtttcctagaaacagagcctcagtcagggatgcagagaacagttgattgattgagaaaaatactaaaagagaaatacacatttttctccactggacttaaaaccagaataacatagattaagcatttgtgtgtgtccatcttgccattacatagaacctgagcatgtaatcaacacagaagaggagagagacaagaatggagagagacctgccccctggtattatccaagtccctggatcaaaccacactaaaaaccaactctaatttgggatgttttcactatataaatgaataaccagacttttttttcttcttagttcaatttgaatgggggattcaatcagaattctggcaatcagaagagttttaaccagtgcagacagcaggcaaactttttgagactaccaggttaaaaatgattgaggagtcttcgaaacttctgtgatccaagactcgcctccctcctggaaaattctagctgtgtcctccaggtgttttaccataataagaccatatgttcctttacagattatggattattatatattcctgtttatgcatataaatatattgggaaagaggaaaactttaaaagaaatcaaactatgagaatcctgtcatcagaaggaaaggcactgacagcaagttaaatgatggtagtatttgagcaaagagagctggtggtttttgtaataaatggttttcaatgtgttatacattctcaaattcaccacagtccccacccatcctaattatcctacacatggacctttcaactggggccagacaggtaacaatgtatggtttttttgatagccctgattttaaactttatcttccctatcagtaaagatgaaagtgaatgcttaatgtgatcttttatattgataattgtttataaacaaaaacaaaagcaaaaacaatggttttgacacaaagctttaccagtcacaaaataatcaaatttactaactctcatagatgtacccaatttttgaaaatcagacattaaagcaccatatctgtaatctacagtgagttaagagagagataaactgtatataagtctcatgacaatattcaatactctggttagaagtccagtcttttctctcctaggtgtcataagacaagtcattaggttaccggaaatatgattgtgactacattttttaaaaataatttcaacttttatcttagattcagagggtacatggtcaggttcattacatgagtatattgcgtgctgctgagatttaggatacaactgatcccaatactacccaataggtagtttttctctcgctcttctggtagtccccagtgtttattgtaggcttttttttttttgagatagagttttgctctgtcacccaggctggagtgcagtggcatgatcttggctcactgcaacctctgcctcccgggttcaagcgattctcctgccttagccttccatgtagctggattacaggcaaccaccaccatacccaggttatttttgtatttttagtagagatggggtttcaccatgttggtcaggctggtctcaaactcctaaaccttaagtgatccacccgcctcttactggtgccatctttatgaacttgtgtacccaatgtttagctctcacttataagtgagaacatgcagtatttgactttgttttggcattcattcacttagagtaatggcctccagctgtatccatgttgctgcaaaggacgtgattttgttcttttttatagctgcattgtattccatggtgtatttgtaccacattttctctattcaatccactgttaatgggcacctgagttgattccatatctttgttatttgaatagtgctgcaatgaatgtatgagtgcaggtgtctttttggtagaatgatttattttcctttgggtgtatacccaataatgggattgctgggttgaatggtaattctatttttagttatttgagaaatctccaaactgatttgcataggagttgaactaatttacattcccaccaacagtatataagtgttcccttttctctgcagccttgccagcatctgttgatttttgactttgtaattatagacattctgactagtgtgaggtatctcattgtgattttgacttgtacttctatgactgcgttttttaaaagtgtttttaaaaaagttggtactctatacaagttactaactattaacacatttcaaaactgactccaggatatgggctatcagcatatcagtaatataaagatatcagtaacatcaagactaagaactgctcacttagagacttcgcgagagaaattaaagatccttcctaatttttgaaagaaaccaaatcagaaaccatccatcactgaaaaactttcactgtccccaccctccttctcacaatggaatattctttctttctcccttacattttaagaatatatagtatctccattccatccaacttctgtagaatttgaatgtccagcctatcttgcatctctccttcatctgagagaggaaaaactgcttctccaagcatagatccaaatccttatctcattgttagacgcctgagatctttgtctattattttcactttagtgtggtattgggtagctaaacacgcaggcaacaagcacataagcactttgagatataaccctactacatgttactaagaattttttataagatttctaatggctgcacgattttctattacatggaacagccataaattatttaatcctttccctatttgggggcatcatttttaaaaaggattttccacaaccttgaaatgaaagtgctgtaattaaatatctgttaatagcactaattatttacttttaatatgtccttaggcatgtaaatactataccaaacaactgaaatttttaagacaaatctcatactagggatatattagacaacagcatatcacttgatttgagtgggcaatataaaatatatggaaataatgccatataagcaaggattgcagtgtgcacatctcaagactactactttgggatattgtattatttggtgacaaagagactgtactataacccttcaaaagtatgataggttaaatgcaatggcaggttgcctaggtgtttggaggagtgtaattggcaaatgtgatatcctccacatctccctctcctctccagtaaggtatcattctggcagggagaaggggtagaggtgagtaccttctgttgagagcacagttttaataagtcaagaatccaacctaagaaacatcatatttgctgtatttagggaagatgcacaagtcagagctgtttttatttcttgccagtttcattccaaacgtaagcaagtagaatgtcttttctttttgacaggcatatggaaagcttatgaatgcagtaatgagaactctgcatgcccatttggaccctagggagttatataacttcatccttcttttttatttctggttagaagaacctagtgatgccttccattacctcctacacatggccacctactgcatcctctgagatgtttccagtgacacagaggctggtgttgttgtgcctaggtttatggcttagaaaatgagggcaattttgtttgactgttcccttagggtttccaaaaataccatcttaaaatgtacacttgaaatcataggccattcgtttcaacaacattcccaagcaggaccagctacacaatttgtgggcctactgcaaatgaaactcttaagtccattgttcaaaaatcattaagaattttgccacagcaataggacagtattataccaagcttggggtccttctaagtatggggccctgtggtattgtagaagtccccatctcaaaaagacaaagcattttactactttctttcctgaagtctcccaggaaaaaggtccctctgcagtaaataaattaaaaaataatgaacacatggaggtggaggtatcacaaagaaaaataacaaactgagaagggttggtggagagacaaaggaggaagataaagagaagagagttaaagggtacaaatacacagatagaaaaaataaatgcaatgtttgatagtagaataggatgactatagttgacaaaaacgtattgcactcaggtcgtgggcctcaaatattctgacttcatccctgcctgtgcatttggtattagttcattctcacattgctataaagaactacctgagactgggtgatttacaaagaaaagtggtttaattgactcacagttctgcaggctgtacaggaagcatagctggggaggcctcaggaaacgtacaatcatggcagaaggtaatgaggaagcagacacatcttacatggccagagaaagaggaagagaacaaagcgggaagtcctacacacttctgaacaccaggcctcatgagaactcactcactatcatgagaagagcaagggggaaaaaatccacacccatgaaccaatcacttcccacagggccgcttctccaacactggggattacaattcaacatgagatttgagcaaggacacaaatccaaaccatatcagtatatatgtaacaaaatttcacatgtaccccataaatttatacaaatggaaaaaaattaaaaggtgagagtctggagagaatgagcaatttaattcagatttaataatacgctacagatgctatcttgaaccacatgaaattgccagtattaaaatattttttatttctaaacacagcattttaaatggttccaactaactcatggcaattgtcacggtaatacatttttcctgggattaatatccttatgagttgacacaccacagaaaaaaggggggaagaaattatggtaatgattcctacacaagggttcctttgtatatgtatgtttgctatttgtgtaaaaactgtgtacatgtgtgttaagatataaacaatgattcagctagggtacattctatgttgctttaacaaggagaccacaaaaatgcagtggattagtgaagacagaagttgatttctcacccccaaaacagtatgggcagggaggcagaggtgctacaggctaacaaggcagttccatctcagcacagtgctgccgtcatctctggggccaagcgagttgctctagcacccactactatgtctgttactcagcctatgagtaagggaagataaagacaagcatgtacccagtcttcttaatggctcaacacaaatgaggcacatccttctgctcacattccagtggccggagcttagtcacatggtcatactgagctgcaggggcagcttagaaatttagtctctagcttggatgctatggcatccaagaacttaacgcttctgttattaaaggaagtggaaaatagatacaagtggacaactcaccatgtatctgccttaagcagtttaacttttttttttttttttttttgagatggagtctcactctgtcacccaggctggagtgtggtggagagatcttggctcactgcaacctccactttctggttcaattgattctcctgcctcagcctcccaagtagctgggattacaggtacacactaccaagcccagctaattttttgtattttttcagaaatggggtttcaccatgatggccagactggtcttgaactcctaaactcaagtgatccacctgtcttggcctcccaaaatgctgggatatacaggtatgagccaccgtgcccagccaagtagttcaacttttaaaaaaataatttgacatatacatccagaacttctccattttttgacatagattagtccttgggtgtagatctgctggttggagttccacattttcttccttacataaaatataatataaccctaatttctagttttagttccctgaaaatgctgtaagttcttaaaaacttttagtataatttagattcagactcctagatttttatattttcattgtcttaacatttgtctcccttaaacctaatttgacagcattgttagctaattgtcattatcatttttcccaaaatattaaattttattttcatagagatgattctctttccacactcataatttgtttacataatacttaattaaattgtatagttataatagcaagcaaaacacccattaacgtactaaagcacaacaaagctaacacttgctgagcatagaggttaacagaagtgtgcaggagaaatagcgattagtttaccagccaagtgtatttagcatggaggtagaaggagtcagtatcctttacagagagaacgagaagagtcaattaatccagcaagttggttgagtataagtcaatgaacagagctgcaactgtgtcttcaacaatataagtaattcctcccctcaacctttaaaccaatcatttcctttaaccactgagcgaattattttagagcaatcatgatatgggaaacacagatttgctatttcttctgtccgtctctctttccaattgcctctcacagtataagcatcagacccactggagcttaaaggtacataactcacttttctaacagcattgtctaaaacacaaaccatccacttcattgggtactcgcctaaaaagacagagatatcttccaacccaggaggaaagtgaccaggttgaaatcattgacctatgctataccactttccaatataacgcctcccaagagagttttgtttgtttgtttgtttgtttttaatgagacggagtcttgcaatctcgcccaggctggagtgcagtggggccatctcggctcactgcaagctccaactcccgggttcacgccattatcctgcctcagcctcctgagtagctgggactacaggcacccgccaccacgcccggctaattttttgtatttttagtagagatggggtttcaccatattagccaggatggtctcgatctcctgacctcgtgatccgcccgcctcagcctcccaaagttctgggatcacaggcgtgaaccactgcgcccggcaagagattttcaaaggtgtttttctctgcagattatttttgccttgtgtactgaccttagaactttacctcggataggatgaaaatccattgaaaaggtttttgcattgaaaatacgccagtgcttttcaaaggcataataaaatagataaaatactagataaaatagataaaatactagatagttagtactttatattttagataaaatactaaaataatttctaaacagcattcagtgttgctgggcatactctgacacttccagaaatttatcagtaccccccgacctacggtctcatctgatcaataaattgccatctcatctcccccaacccctattaaaaaatagcacggtgctcacataatgctgttgtaagagatttattactaaataattgaacaacattgatcttcaaattgaattaccagacccaaggcatttcctttatgttaacaaagagtgactgattcttatcaagcaacaagctcactgttacatcagatactctgggattcctggtttatcttgaaataagaaagtaggttttttaaaaattcacttaaaactaagataactgttgaagtttgttctatttttgattttatgttaggtagttaataacttacatcaaacaaatcagtagtttattactgcctactggtgttagagaatgtctttcctctaaggaatacaattttattttttctaatggattaatgtcttccaaagtctccgcagaagtatgcctgtgtttacaaatatagtgtttgttggtgagcctgaaaaatggaaaaattctgttgttttccctgggataaagacatgtgtttatgtagcactcaaacaatcacatatttaagatcctactttgtacccagcttgtcttgggatccaaggacacaggattgacagagcctctgccctcatggggctctaagattgggttggaaaatggacacaactaggcaatttaaatattgaacatagagaagtacaaggtggtagagatgaatattgggggtacctaaatgcagcttagttatttagggcaacaaatctgtgattcccttaaactttctccctctcaatagccatataaaaattgtgacactcatcttagaaacttgaggcattttcagattactttctagaatattatggcaaatatcttagtgaaagatattcatggattgcctcagaggtaagagcaactaggaatttctactttggcctagggcagagcacagccaactactttggcccacaggccaaatcctgctgccacctgtttttacatgggtcagtagctaagaatggtttctacaattgtgtaggttttttttttttaatggttgaaaaacaatttttcaaacatgaaaattacatgaaatgcacattttggtgcccctacttagagttctatcagaacacatcatacccattcatttaatgtctacgcttttgtactgcaatggcagaagtaagtagtcataacagaagctatgatgaagggtctccaggcctaaattatttactgtctggccctttactgacaaattctgccaatccctggcttagaaaatccattaacttttgaaaaggtagtaaaacacaaaagcacaggccatcctaatactcttagttgcatgttgcaaacaaacatcaatcagcagactcctcggcacattgtctatttatagtccttcctttagtggtcccagaaagatattattctgtggctgcctactcctttcttgttttcatacttagcaagcctgagacatggtgagggtacagagcttctctaccggctctgagatgagtcccttcacctgcttttggccatttgctctcaacacacctgattgtacaggtggactccatccacctggagcatttgttggcttcctaaacataatctgaagtctaaatggatggatatgcctctttctcagggcaaggactaatatgagggaagggaggaactggccttaggcacaaaatataagggcaggggagggaacatcaaagctcaataatacagatcaacagcattacaatgcaatattttaaaaaaccccaattactacaaaaatatccatgatggattttatatatatatatatatatatatatatatatatatatatatatatatatatgtatttttttttttgagacagggtcttattctgttgcccaggctggagtgctgtagtacaatcacaactcactgcagcctcaacttcctgggtgatcacctcagcttcttgagtagctgggaccacaaacacaagccaccatacctggctaattttttttttttccagagtcagggttttgcaacattgcccacgctggtcttgaactcccgggttcaagtgattcgcccacttcagcctcccaaagtgatgggattaaagacccgacctaatattacaatatttttaaaagactgaatcagtattatggacatttcttttgcctcacactccaatatggcttgccatggtgcagttacagacctgttttttctttaaaattttgttattttgttcagtatgagattttttgcattaatgttgattttctaaaaagtattactggattactgagttttttggcacccacttacagtctgtgctgagttgagaacctcagtctctgtaccccagtcttggtcctgctgtgactgattcatgactgaagttcccatgaggactaacaaacttgtgtggggaatgaggaaagagagtagcccttagcatttgaatgatataacacaacgatatcaatttagggaaaactgaagcccataatacttagcatttttataatggaaaagtgaaatcctcccagggttaaaaagccatatatatgatgtgaatgggaaggctctagccttcatttgttacgttataataggaaccccacgtgcccctctctcaaatttcactttgttcactttcacagagtgaaattactgtgctacaaaactgtcccaagggactaactcccgaaatgtgtctgctgagctactacggagtcacaaatgacagagaaaatgctttgcagtatttgttggaagccaggcactgccagattcaatgcaattgcagaaattcattacacatccaaatctctaaaatgccgagtagaaaattacttacatcgagcctcagcagtaggaaaaggtgagtctggaacaatgtccaggaatgaaatgacctcattcaatttagcgaatattgaccaaattcccaccacgtgctaggaactagaaatgtaaatattaagtcaaataatgctgagcacctactgtgtgcttcattttgcacatgaagaaactgaggcacagagatgttaaatagtcccaaggtcacaggtcacatagctaatgagtagtgtgcctgagattccaaccccaactgtgtgatgcagagatatgactctatgctgagatcgctaagacactgcagaacagccaactgaatttacagaacctcctaatttcttgctagacaactagtgagtcactttacccatttactagaaaaatatctttgctattaaatacagggtcattcagccaccattagagttgtagaaacctaaaatttcaaactggaagggccattagtgtgtctagttcaaactccctccccaattttatagttgaaggatctgaggcaccaagagattatggcttgttagagtcatagataattattaaacttctacctgcctgaaaaacaaggattcactaagaattttttaaaaatatattaataaaaaaataaagacaggatggagaattcaatcattaagaatgaaacttgtttattaccaggagctaaaactttggaagaatgattaaggtcttctgcttaactaaagcagaattgcgccctagatatttgcatgcagctgtgaatgtatttcaggttaacatttgccctcaaatcttcctctagtttcccttgacagcaaagcaactgaaatgtacagctgaataagtctactttaaggttctttttaaggagtttataccttgccagttagaagtaaatttcctcaccttgtttgctattacttagaccttcctgtaaatttagtatttttatacatcttacaataatgggtctatgacatttgtagcaaaagaagattgcttttgccttttctcccttaatatttcttttcttcagtaaattccatgtgaataaaatcacactcgtaaagtatgagtgggcactggaaaaagcataggtgattcggttaatgggtccacacagaagtgcacattcatctcaacctacgttagcaactaagggcaagaacttggcttcgttacaacttaagtctttggaagaaggcacatgaatgataacttccatgctttttgctcagaatgaaccttggtcccaaaatcagaggaaaaattcttcatccatgtagcttcagaggaagggatgtcaatggcgacactgtcatcttctagggagcaggttggaaatccgtgggagcatatttaggggcactaatagtatttagaggatgggtcaaggctgctagacatcagaaatgttagacagtcctgaggtaacaaaaggtttttccacagcccacatgacttttgattgacttcatttagtatacagaaacaatgtattttttgataattttaataacagtaaattttccaggaataagattagcatgcaaatcaagggattttttttcttagttttgttaaggatccattcattttgttaggaattttaccaaaagtttgtttttcatcattttggaaaatattttaaaatgacagtattacttgggatattgcagtggccctgtattagtccattttcacactgctgtaaagatactacctgagactgggtaatttataaacaaaagaggtttaattaagtcccagttctacatggatggggaagtctcaaaaaacttacagtcaaggaagaaggcaaaagagaagcaagtaacttcttgcatggtggcagaagagagagagcgctcacacaaaggggaggagccatacacttaccaaacaaccagatttgatgagaacagcaaagtggaaggccactcccatgattcaatcaccacccactagactactaccccaacatgtggagattacaattcaagatgagaattgggtgaggacatagagccaaactgtgtcaggtccatacaacccaactgacactgtctgcatctgtagctgccacaaacactataattcagtgtagatgcccagatacaaacacagacatgccctaaaattgacatacggatgcgcacatgcaagatatggtttggctgtgtccccacccaaatctcagctcgaatttcacctcccagaatttccacgtattatcagagggacccagggggaggtaattgaatcctgggggccagtctttcttgtgccagtctcgtgatagtgaataggtctcacaagatctgaggggtttatcaggggtttctgcttttgcttcttcctcatttttcgcttgctgccgccatgtaagaagcaccttttgcctcccaccatgattctgaggcctcccaagccatgtggaactgtaagtccaattaaacctctttttcttcccagtctcaggtatgtctttatcagcatcgtgaaaacggactaatacagtaaattggtaccagtagagtgggatgttgctgaaaagatacccgaaaatgtggaattgactttggaactgggtaacaggcagacattggaacacttcggagggctcagaagaagacaggaaaatgtgggaatgtttggaacctcctagagatttgttgaatggctttggcaaaaataccgatagtgatatgaaaaataaggtccaggctgaggtggtctcaggtggtgatgaggaacttgttgggaactggagcaaaggtgactgttgttatgttttagcaaagagactggtggcattttgcccctaccctagagatttgtgggactttgaacttgagagagatgatttagggtatcaggcagaaggaatttctaagcagaaaagcattcaaaaggtgacttgggtgctgttaaaagcatacagttttaaaagggaaacagcataaaagtttggaaaatttgcagcctgactaagcgatagaaaagaaaaacccattttctgggcagaaattcaagctggctactgaaatttgaataagtagcaaggatcctaatgtcaatccccaagaccatggggaaagtgtcttcaggccatgtcagagaccttcacagcagcccctcccaccacagacccagaggcaaaaatggtttcgtaggccaggcctagggtccctgtgctgtgtgcagcctagggagttggtgccctgtgtcccagctggtccatccatggctgaaaggggctaacgtacagtttaggctgtggcttcagagggtggaagccccaagccttggcagcttccatgtggtgttgagcctgtgggtacacagaagtcaagaattgaggtttggaaacctctgcctagatttcagaggatgtacggaaatacctggatgcccaggcaagtttgctgcaggggtggggccctcatgtagaacctctgctagggcagtgcagaagggaaatatggggtcagagcccccacacagagtccctactgggacaccacctagtggagctgtaagacaagggccaccatgctgtcctccagaccccagaatagtagatccaccgacagcttgcaccatgtacctggaaaggccgcagacattcaatgccagcccatgaaggcagccaggatggagggtgtaccctgcaaagtcacaggggtggagctgcccaagaccacaggaacccacacctctggcatcagcgtgacctggaggtgagacctggagtcaaaggagatcattttggagctttaaaatttgacttccccactggattttggacttgcatgaaccctgtaaccccctttgttttggccaatttctcccatttggaatggctatatttacccaatacttgtacccccattgtatcttggaagtaactagcttgcctttgattttacagactcataggcagaaggcacttgccttgtctcagatgagactttggactgtggacttttgggttaatgttgaaatgagttaagactttgggggactgttgggaaggcatgattgcttttgaaatgtgaggacatgagatttggaggggccaggggcaaaatgatatattttaggtgtgtccccatccaagtctcaacttgaattgtatctcccagaattcccacatgttgtaggatggacccagggggaggtaattgaatcatgggcgccagtctttctcatgccattctcgtggtagtgaataagtctcatgagatttgatgggtttatcggggggttccatttttgcttcttcctcatttttctcttgctgccgccatgtaagaaatgccttttgcctcctcctcctggtatgattctgaggcctcctgagccacgtggaactgtaagtccagttaaagctctttttcttcccagtatcaagtatgtctttatcagcagcatgaaaacagactaatataatgcatatattataagtcatgtgtcatgcatttattttctattagagatatggcattttctttgaaattatatctgtaagtaggttatattatctaaatgtcactttttgatggtaagggtatattacaaaatatctgtcataaatcagggtcgtttgttctagtagaagagccaagcactcttttagaaagacactccaactatgtactatatgttgattgttcagacacagacaagaattataaaatattggacccaaaaagaaaagaacctgggaaataattgtgcacaatgtccttctaacagatggaacaatgggacccagagagatacgcagccaagaagacctggggtggggacagtagttatgaacaggagagctgtcttcaattatgaaaagaactgcccacacagaagaaagataatttttctgtacatctgtaagtgatgttcatgtaaactagttcaggtaaagaaaaaactagtttttttttttttttttttctttaaaaactagttcaggtaaagagtgagattcaaaagaaaactagttcaggtaaagagtaagaaaaaaactagtccaggtaaagagggagattcaaaaaaatttacttgatgcagaaagctataccatctgatgtaggatgagaagtatttgttttatggctaaaaaaaaaataagccaataaaatacgaaatggaagagaagacagaaatggagcagggaacaggaagagggagatgggtccaggagccgaggttgggtgtatggaccatgcagcttccctgggtcatgggttggccaaaaggcatcttaagaataggcctaatcttcaaccagtatgaacttgtttgtatcactgcaacttaaacccctcatcacaacaaagccctcaaatcttcaataaaacttttctgtgtcacaaatacttaaatgagttgggtttttcagtgaaacttggaggcatggcttcatttaacatttgtgttgacatggtgcaagagaggcaccttgcatggaagtaagagctcagagctagaagcgtttgtgagtctgccctccagccaatcctgatctccatttatgataaagttcaaagatatctaggcaggaattttgatgtctttaaggcttggagtaagtatttgagctactctagcaggttgaatcatatgaagttgcttatacccagccatacataatctaaaaatctcaatttcttgtttcactttgacagaaagcctgacagtgcccatctggtgtttggtttagactaaattaaaactctcctataatccggtctgctgtgccatccttataggtaaaattcattcactgtgtcctatttctctttgtgtacccagcacataacacaaaaccagggacgcagtaggcactcaatagacatgtgataaattaattgaataagtgataatggactccccaatcctggaagaattgagaagagaagaaacaattggcaatgactttatagaactcgtttatgcagtgaggaattggatgagtatgtagtaaaggaagcattggataatatgacttttaaagtctcttccatatatgggaatctttggtaaatgccacacattaacttctagaatgcatcatgcagaaagcttcatctgaacctaaaattgtcaaaaaggtcacctgcaaccctattattttagaatacatagttagaacctgggatgtcctacaaaagtctcctgttttgtaacccagtgttcctcccaattatttattttgcctattttctggcatattgtaaaattaaaaattaatttggtggtgatggtgacaggaagtaatcaccaataaatctaaacacaaagttgtttctatttacacagctttttctgaacatcatttggaagtacaagaaatctaggagctatcagtagtagatgacaacagaataagcaatgaccgatctgctttctttccctttgtggaagacagaaaaataggctaaggaaagaagtactagtgaagacaacacaggaaagaaatgagactcatggatacagcattccagagaaaataaagcaatggctttttaaaaggaaactgacgggtatgttatagggacagtaagaagaccagcatggctggaatagaataaaggagtagaaaggcagttggcaaaaataagccagacagaggggatgccaggaaatgggtggggaagagctgtcagccattgtaaggcttctgactttttctctgcaacaggaagttgttgctaagacctcacagactattccatctacttcacaatcacaaaagcaaagacatctctgagtgagagattgacagaaggaaaggacagggaataggatgaacaaaaatcaggaaaatgttgtcttgacagcttaattgttgctttgcaattttcctcccttatcttacttttacccagtgcaatttgataccaaagtttttcaagtgagtttcatcaattccttttatttctttatcacaatcaaatgaacctaggcaccaagaccacaggctgatcaaaataacagagaaagaatgtaggttttttaaaatatgaaaatgtggttccatttttggattcattcacttaggttaatcttgattatggttatttggtgagaaatcaaatatttttgaaggccagaagggaatgtctatttggataaaacatgttgaactaaatatggttcaccaaattattatatttacacattgtccacacaagaaaaatctgaaatctccagtttcggcgatcaactttttaacctttcaaggaaattttcctgtagaaagaagtaattgtatataatgaggtgtgattacgttaagtggaaggagatgtactatccttgccaactgtgctagcgagttgtttgcctggccttcccgaatgtgtcagcaagaacttctccaaaataagagaagaattccatccaaggccatttctcagataaaaagaaggcagaagagtattttatatcaaaggcaaatacggcaaaaaattactcttaaatctcggtcatttttcttccagattaaagaaaagccagggaactttttctcataatttcacatccaaattcctgtttgggaatgcattctgagaaatttatgaatcaggagacactctgcttactgcgacagtaactagaataagaatctgaattgctccaatttctcaaaaaaaaaaaaaaaacaggtttattttctctgtgagttcatgggcaagagctggaggggtaggtgtgtggggggaagtggatgaatcctatcttttgaaagtaggcttcatctggaagctaaaaagatcatgaaggtcaccttcaatgctattattctagaattctaagacaataagtatagcttttatttactattaaaatagattagttcaccaagatctcactaaattggatgcaacctatatggccacctgaaatagccagaaaaagtggataagcatgcggagaggcccctgtgaagggcataagattggcatcactgtggggtgcacggtcactgtgggagttcactcagcagtggtagagggtaaggtattcatgtgtcacaagtgtggttgaatcacaggtggtttccaagtctagctgagcctcagaatcaattgtggtgttcttgtttgttttctttctatatgcggtgtcctgggatctcaaatcataatcaccaagagtaaccctaaacatccatcgttttaaaagcttcccagggagtctgatgtgggcaggtcctatgccagattcagcatctaacatgtgtttcttaagccactcagtggacctggcattgctctaagccttggctacaaagtggggtatagggctggggtttgagtttaggcccgtggacctgttttcaaggtgttcacattgtctatctctttcactctagagatgtcatagttttgtgtccataataatgagaaggccacttaaaaacatattctattgtgaaatataaccaaataatattcacaactattatttctattaataataatagcttgtcaaaggtccaatcttaagtgctaggcagataatattttaatttttattttaatccattttacagatgaggaaatgtagaattcaagagattaaatacatggtttacacccctctgccaaggcaagtgggagggcatgaggcagaaggaggagataggtttaaagcaacaaggatgagattctcttctacttctgtctcaccctagagcctgtgatcttacctctaatgctactccctcaaatatatatgagtagttcaatatacatggttgaatacacatgttattgacattcctacaatatgtagagttttgacaagcagaacggaaaatgtccctagattctaagtagtctaggtattctaagtagtactgtgattatagtgtcatatatcaaagaggagtgaacttttttattttcttccacaggccaggtatctatatacattatcacttaatttatatcagcaacaaggtttaatctaagccccaattagtattgagaaagctgagtccgagggggctaagttcaaaactacatgccccaagagtggtatatttcaggtctttggatctaaatatggaatgtgcttttttattgcatcaacttagaaatcatataatgagctccttaaaagaaaagctgggtttatgtctcagctctgctgccacttaaaagctgtataatcttggtcaagttgtgaaacttctttcaatttcagtttcctcatctacaaaagcagaataataatagtaatagttatctcaaagggtgaggattacatgttaataaagcagctaatgaagtgtctaggaaatacagacaataatgctattgtttattattaaagttaattttaacaatacttgtagacagtatgttctattaaactctcagaaaatggaagttatggaggcagaaaacagtgagagataagaaggaattggaaaggatattccctaagaaataaggcaaaattgtaagctaagtaaataggtagtgtaatttattgttttctttgcctttttaaaaatttactccttcaaccagtattatgagtgcttactatgtgacagatactattctaggtattggagattcaggagtgaagaagacaaataagattttactccagaaagaacttaaccttccagagaaagagaaagtcaatcagaaagtaagtaagtaagctgtgtgtggtggctcatgcctataatcccagcactttgggaggctgaggttgctggatcattgagctcaggagttcaagaccagcctggccaacatggcaaaaccctgtttctactaaaaatacaaaaattagccaggcacgatgatggtccatgcctatagtgccagctactcgggaggctgaggaaggagagtcacttgaactcaagaggcagaggttgcaatgagctgagattgtgccactgcactccagcctgggtgagaggatgagactccatctcaaaaaaaaaaaaaaaaaaaaaaaaggaaaggaaataaatgaataatatagttgcagttagtgacgaggatatagggaaaatcaacgaagagtgcaatagagaaagggaacagtgactatctggacagaatcaggcaaggaaagacctcattgaggagatgagatttgagctgagacctgagtctgacatgcaacagtctggggacagaacccatggagtagaacagggaaccccaagtggagtgtgcaggagagataaaaagcctatcatatttgacaaaaggcaagcaggccaatgagtgataaagtcaaaatggctatcagggatcaggccttgtggaactgtgtgggtagcatgcctgcctttcaacaggtttgtggagaaacagactgagatggagatttgctcacatcaagtccttgagagcaacacccatctaagaaatgtaggagacaggattgagcagagagagaagttgagctgtaatgtgtttgatatcatttggctctgtgtccctacccaaatctcatgccaagttgtaatccccagtgttggaggaggggcctgatgggaggtgattggatcacaggggtggatttccccctttctgttctcatgatagtgagttctcacgagatctggttgtttacaagtgtgtagcacctccccctttgctctcttcttcttgctccggccacattagacgtgcctgcttactcttcctcttgcaccatgattttaagtttcctgaggcctccccagccatgcttccggtacagcctgtggaactgtgggtcagttaaaacctcttttctttataaattacccagtctcaggtagttctttataacaatgcgagaacagactttgtttgcaacaaagggctcagccaaccccacgagctgctctgagttaggatgtcccagcagaattggcctgcctttggttcatgagatcagattttcatgtctgtcttcttccacccacacattggccagctaaccctaggaaggggatgtgactctatgcaagtggttctcttcacctgaaagcaatttctggataagacatcaactgagaaccatcagccaccatcactcccagcagctgggaaatgagcatctctgtcatggaacagggatctgggtgacagactatagcatccgtcacaatgaccacacaatgaatcattcagactgggatacttctgaaagtaaaaggggttcttattaataatcagctgaggaagcaaacatatataaagaatgtcccagctaaactgatacatgatataatttactcattcatagactgcagtacacagtgtagatttaattttaagtgttctggaaggccaggttacttagaatgtatttgcattactggcctcaaaacatgctggacagcgtcaactctactttctcagaagatctagttgcaggtctctgaaaaagaaaataccccagaactggggtgttgctgctgccgcctctaccttattttggctgcttttgtttcagggctctcataggcatcactgcctcgtcagcctcctactgccttgatgcctctcatattgaatatcaataccgcggtaattttgcaaccactaaactgatttaaagatgaaatggaaacagttcaatatcagcaaagatgttaaaattacatattttgaggctctgtgtcatgagaggaaagtgaataaaggctttgtgttcccaggaggagactgagagcaaggggtgaaggagtgggagagaaagattacagcgctggtgggctcaagaagagccattccaccaaggctcagaataaacacaacaggcaagagtttacttacaggctaacgcggatttgaaaatgatatcaaacccttccagatgctgactgttagcatagatgagtcaattcacagatggttgtaaacagcctgtgccaatggagatggagaacactgtccctgtagtggggattcttaatcaaggacccacagacccctaaaggggttcacaggtagaactcagggagtctgtaaagttggatgtaaaggatgtcacacctttactttcactaacctctaatttaaatttagcaatccttttacttatgaatgtgagcaataaaccctaataggctagaaacgcctgtgactttatcacaaatggaaatcactgacatgctcatatcataatagggttcttgcaagttcctcaaaatctctttcactttcatcactttttaattataagagtcatgagacgtatcattagatctcattttttagtgtgttaataaagaagtgtataaaccgtaaatactataccataaatatggttaagtattttgataattgttttaatactattgatttctttctgtttctaagcctatatatttatggtgtgtacttaagggtttctgttgattttaccagactacgtaaaatgtccgtgggacacaaattggcaaatgccctaccccagattcctgtatttagggatatgccactacatcttcacttcacagcaggtacaatcctcagtccacaatacaggtagataagatttattgcatttgtttgctttctttgaatcaaatgttgagtttagctgcagtctaaatctggggagttctgtattcctcgccttctagatgtcacagtgtgaaccctaaaattggagtacaacctgagagggtacatgggctcttggcttcacacaggaaagaattcaagagcaagccaacagagtaaagtgaaagcaagtttatcaaaaaagtaaagaaataaaaaagtggctactccttaggcagagcagccctgagggctgctggttggccattttactatttcttgatcatatgctaaacaaaatgtagataattcgtgagtttttcagggaaagtatgggaaattcctagaactgactcccctacccccaccctttcaggtcatatagagtaacttccagatgttgccatgacatttgtaaactgtcatgacactggtaggagttttctttagtatgctaatgtattataattagcatataatgaggagtgagaaaggccactggtcactttcatagccatcttggtttgggtgggttttgtctagcttctttaccgcatcctgttttatcaggagtctgcatgacctgtatcttgtgaaagcagtcctgccaaactcttacctcctagaggtttccataatatcatggagttgcagtagagaaatgtgcaatagctgataatatagttctactcatgcacaaatcattttggacagacctcaatttccaatgtgcccagggtgtggagggtggtagtagcaggataggtaaaaggtgaatgatgttattctttgggtccctcatattttgagatccagagaatatggattggcccccaactgacttcaaaaggaaatgtctcttagatgactggcaccaataaaccagcctttgtggttttgctagaggcaactgacctgtctagtgatggccccttttagtggctctgagtgttacccaagacttttcatcagtgatagcagttgctgctgagggtcacagagagccacttttaaatacacactctttcaactgagaccacaataatgcttcaaccatttaaaatttgtcatgtgcacttcaaagaacaaagtcttcctctcttactacattgctgcttaaaaaaaaaaaaaaaaagaagaaaacctctcaaaatcaatttagctcactgctcttcaatattcaaactctgtcattacaaaatccaaaacattcttttgaaacaatttttataagtatcgaacttgctttctttgctttagaaagcaaagtaatggctttctaaaaccagcacctatcagaggcataataaaattctctttcagggactgaagatttttcagtgattccccccaaaatcaacttagacatgaccttcctgcttccgggtcatggaactaccctgggatctttcactgtgctcaggtgaggcaggaaaattgggtctggtgtcagggaacctaaggccaattcacacttcggctatgacaggaaatattttctccgtagggcatatgccgagtaaatgactctaactttacttcatcctcttcatttacatagggcgtataccaagtaaccaatggaatcctctaaagggtatttaaactccccaaaactctctaacagggcccttgagctcctatgctccagcccgctcgcaaactgtggagtgtactttcattttcaataaatctcttcattcctttctttctttgtgctttttgtctaattcttttttcaagaccccaaggacctggacaccctctactggtaacataaacactatgtcccagtttgcctggcattgtcccagtttgtgctgttgccctggcctagtgcctcctttcatcttaaatgtgtcttagtctagatgataaatttcatggtcattctggccattagtccatgcaggctatggctgccacatctacttctttgtatgcctgagccttccaggtacagggactaggctactcctgagccattcctggggaaggccatctcctcagaggccttgacacttgcacaggattctgctaccagagtttaaagggtccatgctttcctggctgcctcacagaattcctccttacccttccctacttctccctgactccaattagaactccttccaagggttaatttcttcatacatggaagaaaataataacatggcagctggctatggctttgagcctgtgaaacaaacgtccctaggcgcaaagagacacaaaggagattagcagacaccctttcatggatgtgggagcctcttcacggatttaattatcctataggggtatgcacatttgtttaggccattttacaactctgtagagacacaagttaacttgtagaaaactggttatagcaaaaatatttcatgtctatacacatgcaaagtctctccagagaaggcaaaattatttctctccccggtgtagaaaaattcagtttgtacctatttgtcaatttatgccagcatctttaatctatagaagcattgtacttgaattctcctttgaagcagttgttacagttcacttattaataagtaaaatctttggcagttgttcatttgtatctgtatgaaagccatgatccttttttttttttttcttgaaaattatcctctaacacctggttagctgcttgaaacagcagagagaggaaaataaaggaacaacacaagctaatagttcaataaaatatctcgtcacctccatttattctttcctttttcccatcacatacagtctatgcgtgactgtggcactgtacaatacagcttttaacttgagatgcagattctatttagttctggattctcctttccagtccttgaggctaattcttagactttacactctgaacaccagctctcaacaaatctatggattcctcccttggtggtctacattaacaatttccccggagagtaattgcgaagaccatttgtgttcattttgcataaaaatgacagaaccgaacagaatttgcataggcatccatctgccatgcttgagctaaaatattacccttcaaaatcccaattcaaccaattttgagtgactgcccaaaatttgtggccaagcctgtcacctctcttctcaaatgacatccacggtaccccgttgcctgaagagtaggttccaaaccagttacttcgatgctttcaaagtcctttggcatctggctcactctatcctgtgacatagcactccccacagaacacagaagttatacaaaagacctatcatttccaagcataacaggtgatttttgtgtcttctattctcgattcatgctgtgccctccaccatgcgactcctttctctgccttctgaacttttactctgcaaatctgagcttagattaacctgaccctctctgttaccctttcctccccagtaaaattccatggacctcatatctgtaatcttataacacttcaaccatatcacaaataaaacacctgatcatagttaagatcagctacaacattcgcagggctcagggcaaaaagaaaaattgtggggtccctcattcaaatttattaagatgtcaatagaagcattaaaccaagtgcaaggtccttctgagtatagggtctgtgggactgcacaggtcacactcccttgaagtctgttcacagttctcataagtatttgctcacatgtcagcctgagccccgtggcttttcaccgcctgagaattaaaaatcaaatcctaagctccccaagtggactgaatggaccccctcttggtcaaggggaaccaagagaagtcatttttttttttttttttttttgagacagtatcttgctctgtcgcccaggctggagtgcagtggtgcaatctcagctcactgcaagctccgcctcccgggttcacgccattctcctgcctcagcctcctgagtagctgggactacaggcgcccgccaccacgcccagctaatttttttgtatctttagtagagacagagtttcaccgtgttagccaggatggtctccatctcctgacctcgtgatcctcctgcctcggcctctcaaagtgctgggattacaggcataagccaccgcgcccggccccaagagaagtcttcacaactgagttcctggctatgactggtcagaaagtcaggcaagcctcattatagctcctccctcactaactgccattcgacttgctttcctaagggctaaacagaaaccagcccttttgaaagatgtgccatactcccctcccttcttgtggttttgacaaaacaactgaccggcatttcttcttgataagagaaagggactggctctggctagtctacagagactgtgcatgagatgcctctgtgtccttcatatcaccttttcatgtatcaagccaaactggaatgcatttaaatgttaagcctccaccccaaagtgaacacgggacatatgcaacacacatttgcttattacacacgtgtgcaccctcctttgtgactgtttatagttcctcctgttacctgttgataacgtatacttagcctacctgttcagcttcaattcctgtctcatccttccttctctgaagtgctcgcgtctggtttttgccaggggctgtgcttcccagcctgcaggatggccaggctgcaggctgcaaccctttataaaaaatgaaaaggagacgaatagcatcaggataaatagctaatgcatgtggggcttaacacctcagtgatgtgttgatgggtgcagcaaaccaccatggcacatgttttcctatgtaacaaacctgcgtgtcctgctcatgtatccgagagcttaaaataaaatttaaaaattcaatttaaaaaaggcagtgtcagaggcattggaaccagagcgactccatcttgagtgagggctggaaaatgaggctgaaacctgctgggctgctttcccagaaagtcagacattcagagcccctagatgtttatggttaaggaacaaattaataatgtttactaaacagacccagacttgggagtgtccagatatcccactatctggagaacaaaggcattcctaattttgctttaaagataataatatcgattcttgcaaaatataataagaaaattaatccttaccacaaaaattaataccacaaaccattgtaccagaacacacctgcccatataatcaagcattgtacctagggtggatgcgttccttctcttactttcaggaacatcctactctgtctatggagtagctgtcctttcaccattttactttcttaataaaattgctttcactttgcactgagaactcgccctgaattatttcttgcgtgagatccaagaaccctttcttggggtctggatcaggacccctttcctgtaacagcaggctttggaggggaaattgttacaatatttttgaaaaataatggacattatctaataaaatctaaaatatattaaaaaaataaagctctcctttccaaatgtataaacattgtggttcaccagttgatagccctgcccccattgcaaatcttcagttttctcattctgaacctcttggtcactgtgagttttctcttgctggtgtaacaaattaccaaaaacttggtggcttaaaacaacacaaatttattctcatacattctgatggccagcaatcctaattccctgtaactggactaagatcaaggtgtcaataaggttggtttcttctggaggctccagggaagaatacatgtccctgcctttcccagcttctagaagctgccagcattccttgacaggtggccccttccttcatcttgaaagcacatgactccaatattttcttgctttgttacatcactttctctctgattctgacttctcttgtcttcctcttatagactcctatggttacatcaagcccgcttggataatccagcatgatctccccatctcaaaatcattaacttaatcacatctgcaaagcaattttgtgctatataaggtgatagttataggttctgaggattaggacatgaatttgttggggatgggggaggttatttttctgtcaccacagtctccaaggcagggtatcaagtgcagggctcaggcacacaacacagatgcaacacagtgcaggctggaagggccaagtgctggatcagcaggaagtcctaagcaacacatagagaggcatgattggcctgggtttggaggggtagactcttttcactactctccctgtagttggaatcttgggcaatcagccttgtaatattgtaagaaggagggtgagcaatggggaggtgggagaggaaccagaggcaaagtcgcagagtgttgagtcagaaatggcgagagaagttgacagggagaggacactgaggggacacagtggggcagccttgtcatctgagcctggacactagctgttcagaggaactgcatggcactaatagaatctggaaaccaggaggttgagggagagggcccccagtcctggataactcattgcaagacagcctatagggctgaaacagagctgcaagatttagcaaatgaaaacacaagatgccaagctaagctcgaatttcagatgaacaattaattttttagtttaagtatgtgccatgcaattttatctggcaacactagcctagagagagccattataggccattcagcataaaaactctattcctaggccacacatagacagaattagaattcactgggcattctaagtcctaacaggggacctatttaccactttcttaatatgctcatgctttctctttcttagccttctgcaaggaatgagcttcttctattccagcatgagagagcttggtcatccttcaagtctcagtcaaggttgagaaattgattcacctatccccacactcagcctggacgctaagagctgaaaacaggtccccttcccaggcaaactgtttgaatgttcattacaagaacctcccaaaagatctatcaactctttaatggaaaacatccatacacagtttaaccctaagattctttgaagccatcaccccaaaattgctatttccactaattctggtaatccttatccaattctaatcaagaccctctttcttaaaaaaacaaacaaaacaaaacaaaaaaaaaactttcttaaaatttccagttctcaacaaattctgaccttactttttcctctctgagacagttccaaagtttgggagatgatggtcttccttaccagggcaagcgagaaactcagctttgtcctatcaataagttgtcctggtgatatgtgaggagccagatgttaacaaggtgccacctcctcctttgggaagccctcctggttaattccaagggtaagaaatcacttcaggcagacccagagctcttcattaggttccatcaggtccccatagcaagcatcacaggcttccgtggagcagagttattagtgagcacagctgaacagagctgagcaccccacgggcagaagacctgtctcctctgagtctataccttccgtgggaaccaaggcctttacctccttcaagagctgctgaaacgtcactgacatgaggcagacaaataagagaaaaggcacacaaatgtatttaatgtgtgtacacagaacctatagaatgaagactcaacccccacaacaaggaacagaaaagtatatatcatcatgaggttacagaaaaaaatgcaggctgagcacatggccaaaaccagattattttggtaaatcaggttttagtggcaaaccaggatatgggagggagaaaggagggggcttggccagcaaaggtggtcttgttatgtagataaagcctcataggtagcagccctcagaaagaatagacagtaaatgcttcttttcagacttttacagatgtcagactctcagtttctgtctcctagaccctggaaaggcctagaaagagaaggcctggctgcattaatggagatctctacaaatgcaaatttctctcccctctctgctgcctctgcaacagccatttcaaaatatgtcaaagaaatatattttggggtaaaatattttttatttcctttaacttccagtatgtctgacccacaaagggtaatcaatatacatgtatgaaagaaaggttaacaaggaactagagaaataatatttgattgtagtgaagtcctataaaaaaaatttgtgcttcagtggaaaatgatgctctgcctacaacaaaccagtcagggctacctaactctgattctaggggagctatttacaactctgtaaattggagataacttctagcagtccaaaataattcttatgtatggcatgcaaatcccgtccagtacagacccaactgatctctgtattagtctattttgcattggtataaaggaatatttgaaactgggtaatttataaagaaaagataatcatttggttcatggttgtgcagaatgcacaaaaagcatagtgctggcatctgattctagtgaggcctcaggaaccttacaatcatggcagaaggtgaacgggaacatgttacatggtgagagagggagcaaaagagaatgggaggggtgtgacaccctttttacaaccggctctcacgtaactaacagtgagaattcattcattaccgtgaggaaggcaccaagccattcttgtggaatttgcccccatgacctaaacccttcccactaggccccacctataacatacggggacacatttcaatgtgggatttggagaggacaattgtcaaaggcatgtgaaccagagcaactctatcttgaataggagctgggcaaaataaggctgagacctattgggctgcattcccagatggttagggcattctaagtaacaggatgaggcagggggttggcacaagatacaagtcataaagaccttgctgataaaacagattgcagtaaagaagcctgccaaaaccaagatggcagtaagagtgacctctggtcgtcctcactgctacactcccacaagcaccatgacagtttacaaatgccatggcaacgtcaggaagttaccctatatggtctaaaaaggggaggcatgaataacccacccttgtttaccataccatcaagaaataaccataaaagtgggcatagagtcccacttttatgtctatggagtagacattctcatattccttgactttgctaataaacttgctttcactttacgaatcgccctgaattctttcttgagtgagatccaataaccctctcttaggaccctcttttggggtctggatcaggacccctttcctataacacaaccatccaaactatatgaatgtccctcccttgatatggaaaaagctagtgttgcctccatttgcatcctcattccaatatttctgatgtataaatgtctcttatttccattttcatttgagccagctataaaatctttctggctttctcatttaattaatgagctcagaaaaattttaaacatgtatttctttctatagctgcacaaaaattattttacatttttaaaaattgctttttcacaaagtctaattctaatataagaaacacaattaagatttttaaaaatggggtcgcatggagggagggagactaggatgttctttcaatgttccactcagctggaccaaattttagagaggtttctttctgactatagccctcacacctcctttatcttagagcatttactttagaaaactttctcaaggacttgggaggcatcgctttgaaatgtcattctcaaaaatgatagggtccctacctcccagtctttgcagggttgtgggtgaggaggagacaaggggccttaatctagaaaagtgctcattagcaaatgcaagtggcctaatcacattgaccagcccccatccctcacactccagcacttaacaacttgcccaccttttgtttcagtggaattgagttcaatctctttcctactgcaatagtcttgacctctattgcaatggtcttgaatggtcttccttacctgcttaactctatccagtgcaatttttcttagataagaaaggaaagaaggaaattgaaaaggaaaaaaaaaaaaacttaagcaataaaatcccaattctatgtggaagatgaaaataatgcatttcagtgcgtttaattaatttgcaaattcaggatctgcacccagatcttcagtccgtatgagacctgtgcttttggcactctctctcttgtttaatcctgtgttccattgacagacagagcagaaatatctacttgtaagagcggctctcaatttttgagtatgctttattccaccaaaaccccccaggccaggctgtttgtggccttggctaacagatatgccaagggccatacaacagcttttctttgcctctgtgttctgtaggtccagaggcaggcagaggatgaaacatcttggattgtccctgacggtcagagatctgcgttaccagaaagcccttctcaggatttgtattctggccacgtgtggaacttaactgcatatcagaaacgtgctggtgattgcaagtagctctgtaaaatatttattcaatattagcttgcaatgtgtactcccattaggtaatggaactggagagctttggctcaaaagaaaagaacaagtgtgagcatgaaagcattaggagtcaactaagttttctgaatttttagatcacaaaagatatataccaaaccctcaaaattagaaatgccattactttttcagtcactaaaggaagaaaacaagggatgaggtcagcactgtggaggtgacattttctgcattcactttttatctttgcaagaagatatgataaatattttctttgatgaaaagtaatctaaaaattgcagataaattaaaattcaactgacaaacttttttttttcctaagaatgagatctttgggagaaaaataagatatttttatatgggtagcagattcatttattcatttaaccaacatgcattgaggaaattagctaggtgctaggatatagtattttttaaaatgatgctgatttataatatagtgcaaaagacagctatcaataaaaattatcacatggataaatatttacttatgtatttatttattttgagacacaatctcgctcttgtcacccaggctggagagcaatggtgtgatctttactcactgcagcctccatttcctgggttcaagtgattctcttgcctcggtctcccgagtagctgggattacaggtacacaccaccatgccatgctaatttttatatttttagtagagatgggatttcaccttgttgggcaggctggcctcaaactcacaacctcaggtgatccaccacctaccttggcctcccaaagtgctgggattacaggcatgagccaccttgcctagccagaaattatcacatggataaatatttaaatacaagctgatctaaggctctgcaaagaaacaatttgtcactttgacagcacacaataagagtttgacctctgcttcaggcttccctgagaaagtgatttttagtcaagaaccttagggatgactacaagttgactaggtggaggagcaaaagaaggggccacggtgggcgaccacgtgtgcatactgaaaactaaagccggaccactggcagttgccagacgaagcaatgatttataggtcaaattaacgattttggtcttcctctcaaaagcaatagaaagtcatgagggtttccgaagactgccttttgcaaagatcactttggctgcagtttggaaaatggtttcagagcaggtggaagactgaacatcaaggagactagttgggtgttagcgaccagctagtcaggtgagaggttctgatagcttgaataggaaggtggccatgaatagggagagaaatgaaccactctgaataacaacaagatttaaattagcacccattaaataactaaatcaaagccaattagagccccttctggaaaactgcatgggtgacgggaatggccggccattttggtagtttgttagagtggctgtgttgataaataagaacgctttctcacctttaggcagttattactaaatcgctcattctcaaaccctttcttccaaattatcaaagtctttctttaagaccagaaaaggtattttttgtccataattattcatctcagaattgtcattgaggccatgtgaacaaagtcctcttgctccaggcaattcagagagactgtagaatcctccactaaaatggtatttgcacttatcctagcaaaaggaagatatgagttttttcactattgctataaggcaggttaaagccatgcagtctgtttatcaggttgtagaattgttctaatcctggaattgtgtaccttaacctatgctttacagttttgtataaagttggccaagaggtgggatgtttttcagaaaaaaaaaaaaaaggtattgaattaaatatcattcagagaagtggcaactgaatgccaccatcgcttgctggtatatgatgaggtaacaattctaaagtagtgtgttttaaactttatcatggaaatcatttcccagcagtcctaaatccaggatctgggatggagcctaggagtcttcactttgaacgatcactctggaagattctgactcaggtagtcctagaaacacacataggaaatactctacagcataaaagcctcttttaatcctcagctgaattcaagaaaatatcaaatggttcaaataggtccagtgactctatttgaaatacaatatttgggctcagacagagcacctctgaaaatccatcctttctacagatgaaatgttttctgggtactctgctttgctttctttaaaattctacacagtattacatacacttcactgacttaacattttctcttccataaacttcgacaagttgttgatgtatttctgcacagaaacattttttttttttactttgaataaaaccaacacttcctgtagggattatgggtttaggaaagagatattttttaagtaagagaatttcaaaattgtagcaaaattagtgtctagtggtccaaactttgcctgtaatgaagagaggtgatgaagagatcagggttcggggaaggtgctggctcctgcctacaccccaagacaatagtaatgacttctcctcagaagtgaaaaaaatgaaatcctataaaattgatgggattaaccatctactaagaataaactaccagtttgtcagaacatatgttaacagacgctaattgttggatatggaagagtttcttagaaatgatctttgtgtcctaaataagagaaaaataaactagtaattaaaacatggtctacacacagtgtgactgtgggcatttgataatcttgctaagccttgcttctcttattgataatgcgtggaaggagaaataattatgttgaacaaattttattttatatggattaaataacattcactataatatacttagatgctacttaatgtcattctgtggtttggtatttttgttgttttatattttttgactaggattaataacattaaaagtcagtttctttcctatatagtcatttaaaccagttaaattttattatggagaagattccatttgcatagcaataaaaactacaaattacctaagaataaactttttttaaaaaagtttaagaccataagaaaaaactataaagctttactaaagaaagactaagataaattcagtattataaatctatccattcttttaagattaataatctcaccaacatcacattgaatagaattctcataaaatcctcatggtatttttttttttataatttgagaagttgattctaagtccatctgaaaaagtaaacgtagaaaaagcagcaaaattatcttgataaagaatttgcattaccagaatcagtatatatgatgtaaaagccacaagattttaacaatgtgaaatggatgcaggtatatggatgcaggtgtttgtgtatatatacatgtgtgtgtgtgtgtgtgtgtgtgtgtgtgtgtgcgcgcgcgcgcatgtgtgtgtattttaatttaagctagttttaaaagagtatctcatttgctcctaaaacaaaacaaacagactactacagtgttgatcaatatttggccccaagttttcatgtcatgaaattgtcttatataaatatttgatatatttcctatatagaaaaatgccagaaggtacactaagcattatatcattatgacattatttttaattgtaaaaaaaaaaatagacacaacccaaataccttcagataacgtgtatctgagcttttttagtatagctgagaaattgcctgctacgtctcaccttctctcagataacataagagctggggtaggggaagcctgaaagtactagtgtattagtctgttttcacactgctataaagaaatgcctgatactggtaatttataaagaagagatttaattgagtcacagttccacatggctggggaggcctcaggagacttacaatcatggtggaaggggaagcaggcaccttcttcacaagacagcaggagagagaagtgtttgaaggagaaactgtcggacatataaaaccatcagatcttgtgagaactcactcactacaatgagctactactacatacccactagaatggctcaaatgaaaaagactgacaacaccaaatattagcaagattgtgatgcaactagagctctcatacatcgtttgttggaatgtatggtcatacaacctttttaagaaaatttctgaatgtgcaattaccctattacccagcaaactaggaaattttactcgtaagtattccctctagagaaactaaaacatatgtccacacgaagacttgaacaagaatgtttgttcatagtggctttatagaagctcagatattcacaaacaaaggaatagtatattcatacagtgaaatattattcagcaataacaaggaacatattaactcacataatgtgaatgcatctcaaaaacaccattctgattaacagaagccttatacaagagtataaactctgtgattccatttatataaattctagaagaggcaaaattaatctatgatttttcaaaaatttagaagagtggttacctctgggtggggttaacattgggaaggggcaggcaggaactttctagactaataaaaagatgtcttgataaggatttgggttatacagttttgttggttttctgtggctgttgtaaaaaattaccacaaacttgctggcttaaaataatataaatttattctctaacagttgtggaagaagttcaaacagaagtctgaaatcaattccaatgggctgaaaccacgtgtcctagaacaatgcctccttgagaggctctaggggagagcagcccatttccttgcttctttcagcatcttgagctgcattttttgctttttcagcttcaagcctgtatacctaggctcaagctccttcctccatctttaagacctgtaaggtagcatattcaaattttctctatccctgtttttctccctctttctctttttctctccctctttccctctgccttcttacctccatccttcctctttctcctgagatcatcacattgctttctctcttcgctgtgtatcaaacctccctttgcccctctcttataaggacatttgtcatagcatttaggacccacccagataattcaagaaaacatccccatctcaggattcctaatcaattatgtctgcaaagtctttggcatcttaacattcacagtttccagggattaggacctcctatctttgggggccactattcagcttaccacaagaggtacatggatttgtccaaattcagcaaacacacaactaagatttgtgcatttcattgcacgtaaattttacatcaaaagaaaccagctgtacataattactgaactttgattataatatgcaggtcaaattacttaggggaaagtgtatgaaggttacatagataaagaagcaagtatagcaaaatcttaatgttagaatctaggtggtgggtatatatgtggccataataaaattctcttaactttgctatattagaaaattttgaatgcatagtttttaaaaattttctccaattctgtaggttgtctatttactctgttgatagtttcttttgccatgcagaagctctttagtttaattagatcccatttgtcgattttttttttgcaattgcttttgacatctttgttacaaaacgtttgctcaggcctatatcctgaatggtattgcctaggttgtcttccaggacttttatagttttgggttttacatttaaatctttaatccatattgagttaaatcttgtatatggtgtaaagaaggggtccagtttcaatcttctgcatattagccatttattgaatcaggaagtcttcccccatttcacatggacaaatagaagggaacaacacatactgggccctttaggagggtggagggaggcaggagggagaagatcagaaaaaataattaatgggtactaggcttaatacctgggtgatgaaatatgtacaaaaaacccccatgacccaagtttacccatataacaaacctgcagttgtaaccctgaacttaaaagttaaaaaaagaaaattttaggtaagtgctttgcctgaaattgtcataatacattgaaaaaatcaaggcatgtccattctaatatacaactgttaaaaagaatgagttgagtagcgtaatgtgtggccctatatattttttgaaaatatcaagttgtagaacaatagatatagtatacaaacaggtggcatataatatatagctgtttttttgtatgtgcaaaagcttcataggtatcacaaactatctcgataaatggagaaatatatactctttccccagattccaaataaaataagcagtcttcttcataaatcttaataaatcctcatttcgcttttacatataaaagaatgtacacatcaacaatagctaatgatatatgctactccttattgagctctcactctataataggtacttaggattaaccatgtattacctgaaacatatcaagaagaaagacaccatcactactctgattgtgtagatgagtaagcttaaccaataaaagcttggaaggatttcacctggagcttctatttatcattaaagaagaataaatcaattttctatatactcccaagtcttttttgagtacaaattatttgttccagtttctagttgatctctcctgaaaaaaaatttctaaaacttcaaagtaaagaactattccccaatctgcagttcaaaatgctgcccaaatatacgaggccccgtctaactggacattaccctatgcagatgaaatctctttctaaaccttctttaacacctacaaagtttaatacctaacaaaatctcatggagatatttattgaatgtttactacatactagacactctgcttatttttcactgtctcatttacatattacaaaaatctcaggaggtaggacctctatgataccactattatttctagtttgcagatgaggaagccagttttcagaaagattaaccaatgtgctgaaggtctcgcagccgggactcatgctaacatcagcctagcattaaaagaatactctccactgtctcttaataacaacaacaaaatagtctactataaaaggtactaattaaacttcctaaagatcttgaataactctcatacatcagagatggattctaggggcacgagcgatgatattgttttcctaaaagtctttgttcatcacttttatgcatttctgctagggaaatctaattcattttttttttcttgagatgtattttctatctatggaagatagttaatatttatactatatcctacattattagtgatgttccatatatattgatatttggaccatgaatcatatatttcattataacccatacatcaaagaacatcaaagaaacactcaaacatatacaatactgataataatgatgataacactcaaacatatacaatactgatgataataatgtctaatatctaacatctcatgttcccaccatttgacagattcaaaacaaagtaaaatgtcttttggagcaacttggatggaacaggaggccattattgtaagtgaagtaactcagaaatggaaaatcaagcaatgtacattttcacataaatgggagctaagctatggatacgcaaaagcatacagagtggtataatggactttggagactcggaagggggaagatggaggggaagtgaaggactaaaattacacattggatacaatgtataccactcaggtaatggtgcactaaaacttagaattctccactatataattcatccatgtaaccaaaaaccacttgtatcacaaagactattgaaataaaatcaataaagtagttgatgtagaaaaaaaaagttaaatgtagaacagaaagagtaagtacctgtggaaaatacctaggttttttttcttttcactcactcttcctataacatactatcctaaataggaagtatttatttaatagctttagtttctcccataccattctcctaactcttagagagaccaaagtatacatgaattagtttcttattttaattacagtttaatactaacaacacctgttggctccaaactgagaaactttttttctcctgattctcatctgctgactggacattactttggcagtttgtttctataacaatttcactatctgaaaaaatctcactctcaaagtaaaagtgattttatcgcattatgcagatttgctttctctcaggttttaatatcaagttagcatgtaagtgttttctacaatgagaattaaacatgctgactctgtataagttatgttgttttaatagttaatataatttaatccaaagctaatactagcctaattgggtttacttgtgccttggcttaaggtctagaatataataaacttaaaggtctgaacacagtgaggttaattatgcttaaaacctgcaaagcagcaagttttaggtccattacacacacacacacacacacacacacacacacacacacacacaccccccaacaggaaaatgagtcaaagaaattcttccagcaagaaatgaaatcacgccttccttctcaggtctgtgtgccgccatagctcaggttataatatagcacttgcttttttcccacctcttggtagagctttctgccaaattatttgtcctcaagggctattcagctcacagttctatgttcaaaatggttctccagtgcctatgaaattaaatataaacagcttactctggctttccagaattctctaatttgaacccaatttacctgcacaagctcattgccctctacttcactgcatgatctttagcttaattaaggtagcttaagtattgtgccctcaacactcaagcaacttcccacctctgttactacccaccccttttcatgctgtcccaattccctttggtatcctcttgatcatcctgctcgccattgttcttccttagtcttgcagggaacaatggcagggtaaggaagtcaagagcaggacacagtcatagcccagcttactggacctaagtgcaacgccactggcttgctttttgatggcattttatatttgccttgcatgcacattttccaaaagtgaaggtttaatggatccagttgttcaccataaaatatagaattatcttataggacgcaagttagtgtgaaggaacctcagaggtcgttagctttccttgggtccagaccatcacaaatctttagcctgtgcatcaatcagtctttcatccaatccactgctgtggccaaatgattgggctgagagagcagagtccaacaggaatgtgtgcaggcataggccagatcaagccagcaaaagacacctatagcatggcaaacattgaagacttgtggactcctttctgtcaagtccccttttagtaccctaaatcccacagacagattcatttgttaagaaatgaaagtggaggagagtatggattcagcaataaagaggaatgaaccacggacacacaaaacatcattgacgaatctcagaaacattatgctgagtgaaagaagccagatacaatcgagtacctactgtatagatctatgtataaaaagactttgaacaggcaaaactaatctattgtgatagaaatcagaacagcagttgcctcattggggatgcagggcttgtccaggcagaatcccgtcagacgcgaaaacgatccgtggtgatgtcaatgatttacatcttgatatgacatgaatttcataggtatgcacatttcccaactcatcaaactgtatacttcaaatttgtgtatttcacaatgaggacattattcttctatatttaaaatgagatttggaaagtcaatacaagttcttatgctgtttttccccatatgtaaatgaattctctcattttcattggactttgaggtgaggagctgcataggcgtgttctctgaagtcagaatttctgggtccaaaccccagttctaccagtttctggctttatgactttgaagttgcccaagcattcttaagtttaaggcaattttatccaaagaacaattatcatcatcatcataaaaacctcacagaattattgtaaagattaaacaaaagagataacacatataaaatcttatgtctcaaggactaagtattcatctattagctgcaagtgtcaataccagatttaagcaccttaaaaggtaaggctgtgctttcttagtctttttgttagtctcaccacacatttctgtgatctgtgcttctcaatcactgggctgtatgtaccaggggtgtgaatagtagatatggaggttttccaaccatataaaaatgacaacataacttaatatatggtagaggtgggagttaaaacaccttagatattataaatgcatgatatatttgtggaatagagtgaaattcctaggtatgctgaagataaaacaagagagttcaaagtggtttcagacattcccctagtggctttctgttatccccagaactatcttctctattctccactgatttcaaggtaaattcagtggagaagtattagaagtaacatgatactgctgaattcaatcaaaatctatattataggtcatttgggatctatatttggaataaatatctgctagttcatattaatttattggcttgactgtattaatctacttaatctgttaagtcctcaaatttcaagcaagtagcaattcaattatcccatgaatgaagggaggaacaatgttgtgcactttgcatatttttaaaaaattaatttaaaaaaggaagtgtcaacaagtagtggctggagccaatgtcattgcctgggttcttttgccaagtggctatccattaatgttggatcgtatgacagacgtgatccactatcgatgttgtccaaatggcaagttccgtcagtgaagactttcagggaacagaatgctgaggacccattggttcttagcgctctcaaaattcatcctgatttagcgtcaggtgttgtggatactgtacacatgaatgctatgcactgatctgtaaaagaactcctaaaatactaaaaacaaacaacttaggtacaatcacattattttaagctgtatttttcttagggagtgagataaggactggggcccttttggaaattctattttacacagatggaaactgccaagatatgaaggcttgagaaatcaacagcctttgggttagcttagggtatatgctccctgaatcccaatacaagagctcagaatgggcatctgcttaagcaccctgaattgctgtgtgtgcactcctataacaggcagacacacactcctgcctgggctgatcatcgttcagcaccatctgcttcacagtcattgggtttccaagtcatgcatgtagatcctttactttaaagcgtaattgttgatttccacacccagccttccttcgtctgctgccatttcttccatagttggcacaatcattctgcaagtattcattgacctcccactatctacagcatagcttagaagttaaaagcacagactccagaatcagactccctaaatttgatcctgtaccatttcctggctttctgaccttggtcaattcccttaacccctctgtacctgtttcctcttctataaaatgggtctgatagtaattctcagcacatggaatgatgtgagcataaaatgagttaacagacgcaaagcactcagttttggctagcacatagcataacacccgataactattgctgttattgttgttagtatggtcggggactgatactgaggatatagcagtgagcaagaccgactctgccttacttctagaggggctcgtggtctagtatggagaacaaagcatttaaaacataaagataaagtgaatgaagggttatgtcatggaaagacaaaacagaagtacacaggaagagcacctaaaacaatcagtcaacactctttatgtactggttcttcccccagtctacgtaagacatttgtgggaaaagcaagaagacaagacatatctttgtggtttagttgctataggagtaacccataaggcacatagaaaacatgagcaccaagtcatggagagacggctgggaacttcagctacaacagtggttctccatgaggtacttttcccaggtgacgtttggcaatatccagagatatttttgattgccacagtgtgggggtgggggagtttggcatctagcaagcagaggtcaggggaggtgctaaacctcttgcatacacaggacagccccacaacaaagaattattcaattgatgtcacgagtgccaaaaatgagaaactctggtctagaaggagagactggattgtgatgagtttacaggacagaacgtaggtctgcttttgtgtctgcttttctaaatacttattatatacattgatgtctccatcattcagactgaaattgcattcattttaatatgccaccctggaacaaacctgtgggaaagatgtacagctgttttctacctgtaactattgaaggctatgaacaaatacctttttttaaaaagtgaccacattgtcttacaccaatttgcataacctactgcaaatcatccctggccctcctggactatgccatggtgtctttcacgtagtttgtgcttcaagtagacaaaagcttaaggggataaacgtcgggagttgaagtgacaccctgttaagtagctactagatttgaattttctccccaggattctatagtaaatgcttaaatatattatattgttacatagagccctaaattgcacataaaaataattccaagtactgtatttaactttagtctgattttaaaagtagtttgccaattgcttaaattaaacaggtattttatcaactggggttcctactaattatgctgttcctcttattaaaaattactcactctagcatgtttcaatttctgtaaaacaaagaaaaagtttttttcacgtttttatttttagaatgaaatgtgcaatgaaaaagaaaaaaaaaacatatgtacaacataccctgttaaaataagtatttatcttggaaaggcaaatgtatgggttctgtatagctagatttaagtacatcaagccttttaaactcaatgactgacttacagtctgtgtaaaaaaccacccatcaaaggggtagagctcatttaattatttacaagtgtgtctttttgcagttaactgatctggggacttctttatccttttttattttgtggaaagtgtcagtgttaagcactggggccaatattcattaaattgtgaatacagctttaaatggatacaatctttctttgtcaattatagctcaataaagctgggaaagaaaaataaaacaaaataaagtcaaatgaataaaagcctaatgtaaactatggaccctggctaacaatgaggtgtcagtgtagattcacccattgtgacacgtgtgccactctggtgcgggtgttgatagtggggaaggctgtgcatctgcggggaaatggggacagggggtgtatgggaacctttagtagtttttcttttctttttttctttttttttttttgagacagagtcttactctgttgcccaggctggagtacaatggcgggatctcaactcactgcaacctccgcctcccaggttcatgcaagtctcctgcctcagcctcccatgtagctgagattacaggcacatgccaccacacctggctaattttttgtatttttagtagagacggggtttgccatgttggccaggctggtctcaaactcctgacctcaggttatccacccaccccggactcccaaagtgctgagaatacagacgtgagtcaccatgcccggtcccttttgtactttttactcggttttgttgtaaacctaaaactgctgtaaaatataaacctaaaaaacaactatcaaaaacactgtaagaaaagcagattagtaaactcatagaatgttagtgttgagagggccttaggaataattcagtttagtatattcagggtataagcagggaaatccaggcccagagatgggctatgccttgcacccagcaatatggtgagttcacggtaaactacaaacatctgagacagaaaaattctaccatggccctcagtgaggcccttgtttaatcccttcccctgtgaacacggtagaataatgtaaaagttcttaggtctagtccagtgagatagaacgctcacacaagtcaggcaaagcagacctgtcactcacagataggcagcaaggataaacggaagtctaggagccatgacgaagctatcctccaaggctcaggaaagctgctccgggcagatggagtctcatctacgcatgccccgcatcgcatcacagctgagaaaccccagcacggctctgggtttatataccctgggcagcacctggctcactgagcccacgtgctgcagaacactctgttctaggaagaatgcagacatagcctgggttgttccgcacccttcctccttatctcagggtgctacattctcagtacattccggagttattctgagaattaccaacaggaggtgggaaagctaggtcagccaaggtcatccaggaatctgtcctcctccaagtaatattcccttgattagactacattatatgaaaatgtcaaaggatatatttgtagacataattaaaaatcttaattggttaactttaagttaattaaaagggagactatcctgggtgagactgcccgaatcaggaaagcccattcaaagagggtgcagcggtcagagactcaaaagagtagagataccctcttgttggccttgaagagaaaaactgccctgttttgagcaattccacataacaggaaacagtgggtggcctctaggagctgtgggattcagtcttataatagcaaggggctaaattgttccaccagtgagcttggaagaggaccccaagcctcagatgggcgtgcagccatggccagcacctgatttcaatctgctgagattccaagcatgagaatcagctgcgtactcagactcctgatctatggagaccgagataataagtgagtgttgttttaagtcactaaatttgtggttaaatcatataacacagaaaattaatacaataaccttgttctgtgattttccacatttataactgcctccctcccatctgtgggccagaccattcttagatcctttgagatgatatagacatttcaagacacaaattaatagggggcaagcaaaggattttcacatgcccttcattccccctatccaatctcccattttataatgcccagatagcttaggctcaacttccaggcctcagctaaagatttaggtgggaattctgatagtcctaagacttagtgctgactttgctattttggcctatgaagacaattagtacaattcattaaaacaacgaaataagtttaaatccatacatctatactgattctaaaaataaaatcaaatgaaaaaaatccctcattggagaaatgtaggaaatttctttattttaaaaatgttaaataaagggaaagacaagcatgtatctccctttcctatgtggattcaaactcagggtaactaaacagctgatgaagaaacttctctttataaaacgttccacttcttggaatgaatgaagaagaaattatagaattcaaacatcactatttaaaactccagtaaattaatggaagttaggcaatgattatcaatggctgctaatatcacttaaagagggaaaaaaacagacaactatgtgcctcctcatggtcaaaccaccacctatgagatcaacgtgccaaaaaaatggaatccgcaatgtaaaaagcctctcaaggtctaatttgcaggaaataccaaaggcagagaaatacgttaaaaccaccacggaaatgcaccaatcaaaactcagacagtgggatatgcctagcataaacaacatggttctttacagatgaattgcaaggaataaaaatagagatggtagaagaatgtacacattaaaacacacctaagagatatatcaataactgcaacttatgaatcttatttgaaccctgattcaaagaaagtatatatacacacacacacacacacactacaactgggaaaatttgaacactggatatttgatgatattacatattaaaaatcactggagcttttaaaagatattcctgcttattttttggaatgagagttcttgacttttaaagatatgcttagtgacgtaatgataaggtatgtgagatttacttcaaataaatgtgacaagatgcaggggtatgtgggttgggtcacaggtgaaacataattggccatgagttgaacaatgttagctagtagactggtgcatggaggtttaatatttttccattttaaaaatatacttaaaattctctatagtagaaagtttatatacaaaaagcaaaaacaatcatgtcaccctctacttaaaatatttcagtgactttttattgctcttgggatcaaagaccaaaatcctgcaaggttctgaataatccagccttcgcttcctaccccagcctcaatagatctcatcttccttctctctgagtttcatctgcaaaggtctctcattcttcccaaggttcagcgtctttgtaggccctttctcttgccagaaatcctcctctccacctactttttcttactgagtgaaacaatcctattaaacaatctcatagcactatgttcattaccattaaggtatttttattggtagcaattacatatagatttggttgaggattttattaatatatgattcccagcagagacctggtatgatttggctccagtgctttgctcctaaaaggtgaacaaaatacttacatgccaaggaatggaataaataaaattactcaagaacatccaaccaatttttgctaagtaatttatgtgtaaagggatgttaaagatatacacaaataaaaaaattgagaaaatgatagtgctcataaagtatctttttcatgggtgtttgagaaagttcaaagatgaatggagagactacaaagagctgtgccacactggatccctcacactgggctcctcagagaggagaagaaagaaccaaagtcaaagcctttgttgtgacacaatttatgcagcagggagtctgtgatagccaatgggattctcaacagcccatgtctgaatatgatgtcctcatcagacagaacagaacgcaagcctgcaaaccaccaatggttagatagtcatcaatggagagctggatttcacttatttttcttgtttttctagcttggaaggaaactaaagtgggctcaggagtaagaaaagagaaaacatattaattctcttattggaaagtatttcctttaatcaaaactgaaattctaacctctgccatttctttttttattacctcttgtgtgcaatatgtcctctaaattcagataattttcctatgagcctaaacctcttacagtattctgtcatttataactaaagaatatgggtttctctctgtgcatcaggtatattttgatcaccctctatgagtaaggttttataatggtgaacaaaatgactctggatcttcaccttgagggaatcacatataaattaatttgggaaataagccccttattctttgatgaataaggtaaagataactctgaaatacatgtattcaatttttgctagatgccacaaagctgtaatacattccaaatgacctggtttctatgttttaaagcaggaaaattatatatttaaaacaaatttctatgttttaaagcaggcaaatttgctatgcaaattataagaggaaaagaatatttccatccaaaggaatataaatcattctattatcaagacacatgcatgcgtagcttcattgcagcactattcacaatagcaaagacatggattcaatctaaatgcccataattgatagactggataaaaaaatgtggtacatatacaccatggaatactatgcagccataaaaaggaaagagatcatgtgagttggaagccattatcgtcagcaaactaacaccggaacagaaaaccaaacactggccaggcgcggtggctcaagcctgtaatcccaacactttgggaggccaaggcggatggatcacaaggtcaggcactcgagagcagtctggacaaggtggtaaaaccctgtctctactaaaaatacaaaaataacaggacgtggtggtgggtgcctgtaatcctagctactcgagaggctgaagcagagaattgcttgaacccaggaggcagagattacagtgagccgagatcgtgccactgcactccagcctgggtgacagagcgagactccatctcaaaaagaaaagcaaagaaaaaaagaaagaaaaccaaacaccacatgttctctcttataactgggagtggaatgatgacatacatggaaacactggggggaacaacacacactggggcctgtcaggggtggggcaggggggagggagagcatcaagaagaatagctgatggatgctgggcccaatacctaggtgatggattgataggtgcagcaaaccacaatggcacgtgcttaacctatgtaacaaacctgcatatttgcacgtgtacccctgaacttaaaagttgaaggaaaaaaatatctccaacacatttctatacgtattcccatagagggtagctaattagggattggatgcgggtggtgggaggaccatataaatagaaaagtattcaacgccatgcttttctgagaaattaataatacagcaacagggatgtttgctctgataaaaaaaaaaagtcaaaatgttatcactcaataagcagctattcgttctaggctctcataacatctctacctactatcctatacaatacaatctacaactttcaggcttctgaaaattgaacgtgccttgtggtccatattattttagagagcactctattttaaatcactgggagcttgtaatatgaatccatcaaactggtcatcttcttaaataaaatagcaatatttagcaaaggcaatggcataataccatacgaattccctttcactgtgagtgttagtgaagttggcagcactttctgaaaaatgtgttgatgtgcatcaaatgccttaagatggtcttaaacctttaaccaattacttcatatgtaggagtcaattcttattaaactgtgggaggaaaaagtaaaagcacacatatatacaaggatattcaacctaaatgccagagaacagaatactgcttaaataatgttgatgtatccgtgtaatgtcatattatacaaccattgggagaaaaatattttcaaagaatatttagtgacatggggaaataattctaatataatgctgaataaaataaaagcaggcctgaaaataccatgtaatcgcaataatatatacatacagaaagaactaaaaatgtacttcttataaataactatagaaagtttatcaaggaagtagtagtattatctgaatggtatagattattttttggatggttcttttttttcaacattttctataatcagagagcacaaaataaaaattatcaaaggaacactggaaaatactatatgcaatatataactctctattaatgagaaaactaacttaataatattgtaataatgagaaaactgacttaaaatacaatatgtcatttttaaccattgtacatcattggaattctttttatgtgcatttgtttatatgccacctacttaccatagagatttcaggcatttaattgggaatccactgaagttgggctttatttctaggcactgtcccttaattttaactaaactcttaagtgaaaatactcttaggcacacaagttgcctacagcatatctatcagtacctagattcctatactagaaatcaacaggtcaccatttctattaacaaataataaaaaagagtattaacctaattcaaaacttgtcaactattcaaaaataattaatcagtgttcttccatgcacttatcctcattcattcaacaaacatttgtggagtctccatgtgcaggcagtgtaccttgggaacaccatgacccagatcccaaggaactgtgtgctaatactactgggcaagatcttacgaggtacacagaagatgaagaaaatgtacctgtcctcacctgctaccagttgttttatgagataataaatgtattaagtaaagcaggtagttgggacacagctatagaattcctgaagaaaaaaaatacatggaatatttttcagaagttgaatgaggaacaataatgaagaaactctcagtcaagtggaatgcactgtcatattaccaggaagccctgatttaaaacagatcaaattatcacctccccgttattaaaataagtcatcagaaataatacccaatagacatggccgaatgtcgcatttacaactaagaactgggattgatatgaaaattcatgccctggttgattagtaagcactagagcaagtgaacaaaaagttaactatatatatattatatacaaagtttaatatatataacctactacatatagtaattatcgcctataattatatagtatactattctatactaatataatgtataaatatgtaatgtatattactatatattcaattttattaatatatgatacattaatataatgtatactatcataattatacaatagaattatattattatataattatgtaatataaaaatgcctataattattatatgtaatttttatatatatattattcttccaggtacttatcctcattcttttttattatattaaaaaatgatatataatatatatcattcataacaccgtatgatatagtcattatatcatcacatgatagagtcattatatgaatgctacatattcataatatatacttatataattgcatgtattatggtattatatatgtaagatatgatatatatgattatattatatatgattaatatgtaatatatcatatcagataatatactaatatataaggttatattcatatataattggtaatatataatatatattatataatatagaatacaaatatataaaatatataactgtatatatcagatattaagtatatatcagatatatgttatatatttatatattacatatattaatatgtaatatctatatattatactacaaattaatataacattaattatatcagatgatatattatatgttatatattattttacaatatataatatatgtcatattttatattattttacaatatataatatatgtcatattttatattattttacaatatataatatatgtcatattatatattatataatgacataatatatgtattataataatgtattataatagtatatgttatatattaatatatcatatataactatatattaatatacgttaattatatcagatgatatagatgttatatatttctatattatttcatattattttataatatattatatattaaatatataaaataaaataacaattcatgacagaaaaaaagtacaggtttgatctataaaggctcaagctaaaatatgattccagtcaaattaggtcatagattgtggagaggatcattttgttttcttaaattatttgcacaaagaaagaatagggtgccttaaaataaaataaataagcaaataaaaggaagctagaaaggaggtgggagaagagagagagagcaagagaaaggaggaagtgggggaaggaagactagtaagagaaaagtaagcaaagaaaacaaaatattgatttttcctggattaccagttagatgcagtttctgtaaattccagtatccaattctgaaatgctcaccagtttggaatgattattttgctgatattataaagatgtattgcttcttccactgagtcaccctggtgcctaaagcttacctctccaccccgatccttgccctgaacaaagattctcaaactgtaaacccaggaccaccaccagcaccagcagcagcagcacctgagaacgtgtcagaaatgcacatttttagtctccatcttgcacttactgatacagaaatggatagagtcctatagtttcttttaacaagtgccatctccccctcctgccccaggtgatcttgatgctcagaaaagtttgagaatcactcccctaaatcacccagattcaggaaactctgtcaggctgagagtggccacagggcaccgtcatccataggttgctacctggattccagaagcacaaggtggaggagacatgtcatatgctgacacgtggctgccagatcatgtgccatggacttagtgattcacaggctgcctctcacctaaagcacaccataaacttgtgtattagaagctatcttagtccattttgtgctgctgtaacagaatacctgagactgggtaacttataatgagcagaaatttaatgactcagttctggacgttggaaagtccaatatcaaagtgctagaatctggccaaagccttcttcctgcatcatcacatggcaaaatatggaagggaaagagtgcagaagagagaacctactcccataaacccttttcataatggcattgatctatttattagggaggagccctcattatctaaacaccttccattagatgcagtctcccaacactgtcacactgggaatgaagtttccaatacacgaattctggaggacacattcaaaccatagcatatgctattatcctcttttgatacataaaatcacaaagaattagagaacctgaaatataatctgccagcacttagccaaataaagtatacacccatgtaccaagagtttggctcctgggtgtataatccaaagaaattatcacacaggtccacaggaaatctgtgtaataattttcactgcaggaggttaggaatcaatctgtgtgtccatcactgagagagatgaaaaacaaaatgtgaggtaagaaagaaacatagaaggatcttaaatccttagtgctgaaaaggacaaaggctcattcagaagaaagaaccatatttatccacctatgttaaaattacacacacatacatgcacgtgtgcacacgcacacacacttcacagtgtatttacatcatatacaaatgtgcacatgataaacaatacttgcattagttttgcaagaacaaatgcaaacaaagaaattgaaattaaatacatttgaacgggtgcctatggattgagtaggtgagctggagggaattatggggtcaaaatgacaaatgaatgacaaattaaaatgaaagaggagccctgtaagaaactgtgtagggaaaaaactctctaaaactcccaaactatgtttttcctctgctctcacactgcaacaacaatcatcaacacagaagaagacttctgtgatcaactgtgtgggttttctccccaccatcaagcagcagacgccagctgggtgacctccaattcaattatgaccctacccagagatagtgtcaagattccacaggttgaaggctcagtccctgagactgccccactccacagccacaagtagcaagtctaggcctccagaacttctgaccaacctccttcaagttggggtttgcacaactacctcttggagtttaatatgctacagtggttcacagagctcagggaaacacaatacttagatttacaagttccttacaaaggatattacaaaggatacagatgaagagatgcctagggtgaggtgtggggaacagggagcagagagcttccatgtcccccttaccgggcgccaccctccagaaaaccccacctgatcaaccattgggaactctccaaacccagtcctcttgggtttttatggaagtttgatgacattagcattccttcccctcatagtatagggtgggaccctctctggggaggatgttaagacccacaatcagaaaggtggggggagagtcaagtcctgccttgagacaggtgaaagaagagtgggggaaggtcagaggctgcccctgaagcctacaacaccccaacattgcaacagaagactgtaacagggctaaaggagttaggagccaggagccctggatgaaaacctacatatatcataacaccacaggacaaatgataaagtaatgtgacatcaactaagaaatatgactaaatccaagtttttaaatatgaggagagagaaagtaaaagagaagaagaaaaagaggagaaggaggaggaggagagagatgaaagaaaagagatgagagagaaagacacaccacacttttcctaggtattcaactggtcagtgactgctggaatttgagaccagctctctgtcagaatttgaacacattaacccattaagcattttcttaatgaagagccaagctgctttcttttaaatgttgcctttaatgaaggatttatattatgtttcttcagatacatatttattcatttgctgcatgaatatttactgaatttctagtacatcccaggctacacaggtaagcctggtgctcacagtgtaagagtctccaggacctggctttggaatgtttatttggttgtctcctacattgcctttgtatatcaaaaagggcaaagtgcttaaaacatccaaagaacatctcctagtaacccacatattcattggattcttctctgacaatcagaatcacaatgagggacctgggaggcaatatctagcagaagcttctagatcacttaataagaacttcttaataagaacttctctagcaagaagatttagacgcataaaacaagagttgaatgatcgagaacaaaaagtcacaccatcggctgttttgtgtgctgcaagaatatacatgaactcatgatacataacacttcattaaattgcatgccaaacttgtctggcagataaccattgtgatagcaacctattacttttagatggctcttcacagttgaaaaaatgctttctcccagtgtttcatttgaacttcaccataggcaaagcaagcctcacgatgcccattctgtatgatctgaatctatttaaatgcaattattatttgaattttatctttttcatattcgaaataagcatacataaaaccaaaccaaacaataaacaaaaacatttcctgttcatcttatttttgtttactgcccctctctctgcctatacagaattctaccataatttttttttcacattgaatagccactctttttccctccacctaaattgaataaagctaccagtgttttaaaacactgaaagcaatcatcttcatttacttcccattcccatcagagggttcttattaagtgatctagaaactttgcagtcggctttagagagattagtggtcctgattaacatatcaccaagacactcaatttggcagaccaaaaacagaacattgggaacttcagtttgaactgaagtttgttggggaacaatggatggctagttcataattttcttccttctttttacgttcatctctttgggagacggcatggcattgtgacctgttaggaggtaatcctgttgcaaaattctgccaggagactaggggaactgcaatgattctcctctctcctgctaacttcctctgtgacctggtaaaggaaatttcatttatgtaagcttttctagccttgattcagctgctcagctgcatcaaaccttggcttgcacatttgtacagcaaagatagaaataggacttaaggccaggcacggcggctcacgcttgtaatcccagcactttgggaggctaaggcaggcagatcacgaggtcaggagttccagaccagcctgaccaacatggtgaaaccccatctctactaaaaatacaaaaattagctgggggtggtggtgcatgcctgtaatcccagttattcaggaggctgaggcaggggaatcgcttgaacctaggaggcggaggttgcagtgagccgagattgtgccactgcactccagcctgggtgacagagtaagactctgtccccagaaaaaaaaaaaaaaaaaggacttagccacctagggttttcctgaggataaaatgacaagagccgagtaaaggacttagcacacagtcaggcttttcaaaagattttattttcagagtggctattttctttttaaaactttttttcccaatatttaagttttaaagcatttccaaattaaattacatgtgacaatcaatgtgctatatttaacgtggtggtggtgttcttctttctcttgtaaaataaacagctctttaaatttaaagtgtattttacaattaatgatttattaaaatcaagaaaatttggtatttgttttataatgacaagttgggagttaaaaaatatttaaagtctgtttttcttcaatgatgtcttttatcaactgtgttggatcattttattgtatcttttggagagactaaacctcagcagtgacttctacattcataattggtgatcaaatttgtgaatggttttattatttgttatctttgtgcaaaatgatttgaccttcccttcagggaatttgaacccagctaatacaattaccttataaaaccaatcacaatgaaaaaaatccagaaaaatactatgtattgttcatgcttcaaactgtatgttcccagaaacaaaatgccccaaaagcagaacacaaaatctatagcaaattagtccataaaagttaaaacatataagtaacatggattccagagacaagatgatcgatctttttttcatataaacagcagactgggcatttatgagtgatagtttttgaagtatccataacttaaaagactaccttggctaatttcctttttccaagcaccccttagcttaggacatgctgtttcccctgcctagaatgttcctcctcaacagtccatgccattcagcctcctgttccttcctttaggctctgtttcacttattcttttttgagacaagtctcgctcttgtcgcccaggcaggagtgcagtggcgcgatctcggctcacagcaacctccgcctcccgggttcaagcaattctctgcctcagcctcccgagtggctgagattacaggcacccactgggctattttttttttctttttttttgcatttttagtagagatggagtttcatcatcttggccaggctggtcttgaactcctgacctcgtgatccacccacctcagcctcccaaagtgctgggattacaggtgtgagccaccatgcccagcctctgtttcacttttctaatctcagttcagccctccctctctcaggcaagcctgccttgacatcctctcccaccctagacatcagatacttccacagcccccttgatgccctcactgacactgataatgcttataattgctgactttggtgatcagtgtctgtctcccctggtgggctctgaacccaaaaggaaaaaggttggcacatctgcattgcaaggcacttgatctgagctcaatgactatttctcgaatcaatacaatgactaaggcacacttctgttaagattggcacgtaaggtatgtcctcccaccacaagttaaccacctttttttctttctctgatgagttacctgctgtagacagacatgtatgcatgcttgcacacacatgatcacttcattagagccactgcaaacccagcaaggattaacgagcaaaactgtggtcgaagtgcatatgggctgtgggctgatgttactcgtgattcacatgactagcttctcatgcctggccagcagtgtgtgctcctcatgtttctgcctcaacaaaataccaactgctccccatcctgggtctttgaggtgtctgcgagctgttgaaactgtgaatgtcaaagctatgaatgccaaggatcaactgtaatttcagaatattttaaaccacgagatctatgacaggcagaatgattgtgcaattatctaggttagtttatgagacaaataattattactctggtataactgggtttccatatcattctcatttgaaatctctaatgttatttaggatgtcatttctctcctctagaaagagtttacattttagtaatatccactgaattagaggacaaataatcagatcatttgaacaaaacatcatgcaatgttaagtttttttaaaacaactttatcaagtataattgaagtaaataaattgcataaatttaagttgtaaaatgtgatcagttttgacatatgcatgtatgtataaagccattacaatagtcaaaacaacaaatctttttatcactccctaatattgtttggctctgcatccccacacaaatctcatcttaattgtaatcttcacatgtcaagggagggacttgatggaaggtgattagatcatgggggtggtttccccgtgctgttcttataatgagtgagttctcacaagatttgatggttttgtaagtggcagtttcgcctgctctcgtccttcctgccaccttgtgaagaaggatgtgtttgctttcccttccatcatgattgtaagtttcctgaggcctccccagccatgtggaattgtgagtcaggtaaaccctctttcctttataaactatccagtctcagggaagttctttatagcagtgtgaaaatggaccaatacactcccccaaatttcttcacactctatgatcagaaatcctttcctccaccccatatccagtaacgacagacctgctttcttctctatggattagtttatatgttttagaactttatataaatagaatactacaatgtaccttctttttgggtctgagattctttcaattcagtataattattttgaggtccagtcatgttgtagaagatatctatagcacatttctttttattacttaatagtatccattgcatggatatactgtgactgtttttcattctcctgttgacagacatttgggtttggttccagtttttggctattataaatacagctatgaatattagcatgcaagttttgatgtgaacatacattttcattttttttggtggggggggggtaaatacctagaaatgggattgctgagttttatggtaaatatgtttaacttcttaaaacatttccaaactgactcccaaagtgaatgtaccattttatattctcattggcagtgtacaagactcccagtagctccagattttctccacttgaaattaatgtttttttgtatgtttgtttgcttccaatctaatataatgtggggtatctcgctgtggttttagttaacatttccctactgactattgattagcagcattgaccattcatacacatccttttgtcaggtgtctgttcaaattttgtgcccaattttttgagctattgtgttgaaatacttccatgttgtagatataagtcatttgttgaatatatgatttgcaaaggtttcctcccagtccaaagcctgcctttgactttcttctgggtatctttcaaaaagttttaattttgatgaaatacaatgtttcagttttttgtttgttttttgtttgtttgtttttaagacagagtttggctcttgttgcccaggctggagtgcaatggcacgatctcggctcaccgcaatctctgcctctggggttcaagtgattctcctgcctcagcctcccaagtagctgggactacaggcgtgtgccaccacgccccactaattatgtatttttagtagagacagggtttcaccatgttggccagggtggtctcgaactcctgaccttgtgatccacccgcctcggcctcccaaagtgctaggattacaggcatgagccacggtgcctggccacagtgtatcagtttttattattttgcactgttcatgttttatgagtttgttttttgtttttaatatgtgtgtctctgctttcagtataatgggaatgtattggcatttttcccctttttctatgaaggctaacgtccttagctaactgcagctctccttacatgcagcagaaactgcatcaggccctgaggccacagagttacatagttctcagtccctggccagtgtgagctaactatctttaggctgcagtttccacagaagctcccagagcaacgtcaggtcctctgacttgttaaaatgaagcaccaagtgaaactcagccacagcgtttttgccactgcatttccctaaagaaaggtggaagagccagtaactacattgaaaagtcatatataaagacttttcagcttgttatttccaaagaagtattttcagagaaatcaacttctggcatctgttcataagggtaggtaactttctcggtgtatccttaggcctatcacgttgtaagtattcagcaaatttttttgttttttgcattttctgataccaatgttttcaaaccaattggaaggtagaagtgttttgtcaatgtagaagttgtctctggaatacccgccaaccctcttgaactcttagtctgagatgcaagctgccatagtttatcttcactgaatgaattatcctactctagataagtgaaatttgcattagaaaaatgctccatgaaagttggcagaaataccttctagacttgccagcaattcatcttttgttctttttgctaaatccctgtgggaccatgtatcttccagcattgtaataaaggaattttcgtttttattttcaaaagaaaacaaagattagtatttgagctagcccttctgttttacagatgaaaatcaagaatacgtttcagggacactttgttatataaatacttcaaatcacaaagaccagagggactatcgatatcactctacatgtaggttttattatattgtgtggggcttgatttatggggaaaatgcaccccccaacacaaatttgatttttataaatgggcttatagagacaaatctttcttacaaaaatagtctatttattatctgtaggtacttctacctccaggaaagctcccgaggtttactcttcacccctcctatcttgaaagggggccatacttacagactcgcttccaaagaatagagtatggaaaggtagaaagaataacataacagtggagaagcctagcaggcaccagttttaccaagtgatgaagatcaacctcaccagagatgtcatctggatataatgtgccacctgatgtgatgggatgagaagggcacttcacccctgtggctttcttccccaaaatctataaccccagcccaatcataagcaaaagatcacacaggcccagattgggaacattctgctggttatgaggccagtactcctcaaggcccttgaggtcatgaaaaataaattctgagaaattcacagaacagaaaggacagaggagaatatgacatctaaatgcaatgtgatagcctggattgaatcctggaacagaaataggatgttaatttttttttaagtgaaatctaactgaagcctggaatttagaattttgtttaagatggacttataaataggaaattataccttttctattaaataaaacctttttaacttctgagagatgtgaggcatgagacacactccactcccaagtcttaccgtgcacactttatttttacactgagcctacaataaaaagatcttcacaccatcagagtgaacatgtcaattggaaaataaaaacacagaatggttttctcctttgttggaatgctgactgcatgtcagaaacaggcctaaaaagaatttgccttttgcttgataattgtgaaaaattatcacagaactaggaacctgatttttttaaagccttatataaattcaagcaaaaagcaatgtgctgagtaatggtggatacaaggcaaagagtaaatacagatctgccagaaggagaacatcatcaaaatatagtaagagagattggaggcagtaaggcaggaactaacgtttacactgctgccatgtgctaaactctccgctcagcgtttcctaataagtgtctacattagttctccaaaaaccaaaaatcaatgctgtagatttcattaacccatttcacagatttaaaaactagagttcagagaaattgagtaactttcccaagatgggatgtagtaaacctgagattcaaagcaggattcatatctccagaaatgcatattgtttatgaaaataatattccccaaatgtcattctaagttatcaaagtatctgtgtaccacctaaactaccatttcctttatactcatctgagcaatctgctttttaactaaaacatatgaacatgaatacatgtgtggagtgtgtgtgcatatgtgtgttatgtttgtactcagtactacatatgctaccaaagcaaaaagaacaagcatttcactgtgaaaatttagaaagtcaatagggagggccctttataacaggcagctttgctacagtggggtttcaccataatcgatgtgcatagaaggggcgtgtcagagcgtgggtcgaggtgtgggctggagaagacggtgggctaatcagcaaatctttgatatgtgctggaggtgaagtacaaggcacaagcagactgccttttgacagtcaccttatttcagtgattcaatgaggtcactcattgttgacaaagtgagaataatgtagttacaaacactccaaggtccattacaatccatcatgttctaacaggcatcaaaggaaggagacgccacaaattccccttgcaatcaactcccagttttaacttcactgggaagattattcctaatacctttactacaattctcccagtgtctactggcatttgttaaatcaatcagcacagtgacccagaatcctcacctttctcaggctgctccatgttcaggatacatcacacgaaagtcacctatcctggggccagcacagttctacagctatttggattatgtgactctgctctaggcctttgtagggccatttttccttcttggagcatcttgcctttcactttcagctatgccctttgtattagtctattttcacactgctataaagatgctagctgagaccaggtaatttataaagaaaagaggtttaattgactcacagttctgcatgcctggggaggcctcaaaaaacctacagtcatgacagaaggcaaaagggaagcaaggcacatcttacatggcagcaggagagagagtgagtgaagtgggaagcatcagacatctatcaacaaccagatctcatgagaactccctcactatcatgagagcaacagggaggaaaccacccccatgatccagtcacctcccaccaggtccctccttcaacatatggggattaaaattcaagaagagacttggatagggacacagagccaaaccatatcattccacccctagactctcccaaatctcatgttcttttcacatttcaaaaccaatcatgccttcccagtagtcccccaaaaagtctttaactcattccagcactaactcgaaagtccaagtccaaagtctcatctgacacaaggcaagtgccttccacctatgagcctgtaaaataaaaagcaagttagttactttcaagatacaatgggggtacatgtattgggtaaatgttcccattccaaataggggaaattggccaaaacaatggggccataggaccctagcaagtccgaatcttgtcagggcagtcattaaaccttaaagctctgaaatgatctcctttgactccatgtctcacatccagtgcttgctgatgcaaggggtgggttctcacggccttgggcagctcacccctgtggctctggagggtatagcccctgtggctgccttcacaagctggcgttgagtgcctgtggcttttctaagtgcgtggtgcaagctgtcagtggatcgaccattctgggagctggaggatggtagccctctactcatagctccactaggcagtggtgccccagtggggactgtgtgtgtaggctccgaccccacatttcccttccacactgtcctagcacaggtcttccatgaggcctgcacccttgcagcagacttctgtctggacatccaggcatttccatatatcctctgaaatccaggtggaggttcccaaagctcaactcttgtcttgtgcatacctgcaggcctaacaccacatgaaagccatcaaggcttggggcttacaccctctgaagcaatagcctgagctgtaccttggtcacttttagccatagctggagctggagcagctgagatgcaggacaccaagtcccaaaactgcaaagagcagtgaagttatttttccctcttaggcctctgggtttgtgatgggaggggctgctgtgaaggtctctaacaagccctggagacattttcctcattgtcttggctcataagctccttgttactaatgcaaatttctgcagccagcttgaattcctccacagaaaatcaatttttcttttctaccacatgtccaggctgcaaattttccaaacctttattctctgcttcccatttaaacagaggttctgatttcaaagcatctctttgtgaatgttgttaactgaacactttcagaataattcaggtcacctcttgaatgctttgctgcttagaaatttcttccgccagataccctaaatcatctctctcaagttcaaagttccacagatctctagggtggggcaaaatgccaccagtctctttgctaaagcatagcatgagtgaccttcactctagttcccaataagttccttaactccatctgagaccacctcagcttggacttcattgtccatatcactatcagcattttggtcaaaacaattcaacaagtctctaggaagttccaaacttttcaacatcctcctgtctttttctgagcccttcaaactctttcaacttctgcccattacctagttccaacattgtttacacattttcaggttatctttatagcagtgccccacaacctcggtaccaattctttatattattccattctcatactgctataaggatactacctgagactgggtaatttattaaaaaaaaaaaaggaggtttaattgactcacagttctacatggctggggaggcctccagaaacttaaagttatggcagaaggtgaaggggaagcaaggcacgtcttacatggcagcaggagagagagcatgaaggaggaaacaccagacacttatcaacaaccagatctcgtgagaactccctcactatcacaagaacaacatgggggaaaccacctccatgatccaatcccctcccaccaaatccctcctttgacacatggggattacaattcaagatgagatttgggtggggacacagagccaaacgatatcacccttcacctggttaacccataaatacccattctttggtcccagcttgtatgtcactccctgcagaaagctgtcctggaccttgctatcgtgtttaggacccttctctctctctcctgataccttctgtttttccttacagaggaactgagttaccattgcctgtgagagtgtccatctttcccactggcctagagctcctccaggacagagactacactttttcccttttttttttttccaacacttggtaaccagcacagtgtataccagatgccagtaagttagtaaagaattgctatatatacaaataaataagagaatgatcaaaacttcccaatcatccaaagattggtgatgctatttaaggatcagggtaatgtccaccaatagatgaattgacagagaaaatgtagtatatctatataacagaatactattcagcattaaaaaggaaggaaatcccgtcatttgtgacaacatggatgaacctggaggatattatgctaagtgaaataagccaggcccagaaagtcaaatactgcatgatatcacttacatgtagaatctaaaaacaatgaactcataaaagcagagagtagagtgatggttgccagggagtgggggtggtggtggggagggttagggagatgttggtcaaatgatacaaaatttcagttagatagaaggaataagttcaagagaactgttttacaacatggtgactttagttaattacagtgtattgtatacttgaaaactactaagataatagatttgaagtgctctcactataaaaaaacatataagaatataggaggtaatgtatatgttcattagctcaagttagccattccacagtatatgcgtatttcaaaacaacaggttgtacacaatatatacaatttgttaattgaaataaatacaaattcatccctctgctcctctgccccagagggtaacagctatgtgaagaattaaaaaaaaaaaaaaaaaaaaaaaacaggatgagattagcaatgtccatttctgtcaagtaaatgggaggacctaggccttataatgagctcatcacttgagtttactttgtgcagaactagcctatatggctctctcatgtaaccaaaatgtattttttaataaatgtattgagaagaaggagcaatatctgaactaggacaatcccgtaacccagtcatttcgtagcaaaaatatattcatttgttaactgagtgtctggccttctgctaaatgttgtggctgatgtggacaaccacgagttagtagcatggttgggtggacatagccagcacacacagaacaggagaatgaaagatttaaggtggtctatatataaataactgagtgataaattgcctgatatgcaggagtcttagcatgcacaaatttaaaatttttcagtttccattcttcatccgggatgctgaaggtcactgtgtggtccatttaaagggttggactgtgggagtgaatcccttgagctagtgcctgacctgtcatctggcctctacacatcagcacagcttcatcatcctctgcctgtctttctatgtgcaataattgtagcaaagggataagatattgcagattcaggttaagttcatggtcaatagtaaaataatactgatataatgtaccattgtacagagttcattttaagggcagaattaactttaatggttttataggcaactttagttttatatttatagagtggtaagggtgtgaggaagtcactaagacttcttagtttttctttactcagctttgtggggaaaactgtatgcttcagagcaacagtgaataaactaaatctggcccaccaccagtaactaaagttgtatcggaacacagccatgctcattcatttacgtattgtccatggccaattgaatgctataatggcagagttgagtagttgcaacagacacggtatagtccaaaaacaaactatttactatttggttcttcacagaaaagggttctcaacacctgctataaagatgctctcaaatttagaagttcacaaaatctcatattgaatcccttatgaaaaccaagaattgattgttaacttggaggttcacaagagaaagaggtgggatgggagaatagaaggtagacaaagaaagattcatagggagagaactgcagctttaatgctggttaaacatttgcatgaaccaaaaaagacaacccaaatcactttttacaattgtctgcttttagaaaagaacacattagttgcagttgtaaaagaataaacaggtcggccggacacagtggttcacacctgtaatcccagcactttgggaggtcgaggcgggcagatgacctaaggccgggagtttgaggccagcctgaccaatatggagaaaccctgtctgtactaaaaatacataattagcctggcatggttgagcatgcctgtaatcccagctacttgggaggctgaggcaggagaatcacttgaacctgggaggcggacgttgcggtgagccgagattgcaccactgcactccagcctgggcaataacagcgaaactccatcaaaaaataaataaatatatatatatataaataaaataaaataaacaggccaatgttgaggcagggaaattacttcctacctctggttttctggatgttgaatggttgatattttatatttcagtcctcaaatcataaagtatttgagcacccagtctgaatatactggacaaaatatattttttgcatgtttaacctccaaatgtgtatgcattcaatagttatctggtaattacttatagaatcaaaataaaacaaaaatcaattattatgagtgcagataatctttaacctcacccgctctggttgagagacatttgagagtgggagtccgggcacaatccagagtgggagtcagatgcatggaggagagaaaagggagcagaatttagtattttaaataatgcagaaatcaccctccaactcaggccagaagagtgtttttataccctgaaaactaaggagatctatcaacaaattaaccactgcagttacaggaaatgtggagagacaacatcttgtagaaagcagtctcaattattttacaaaattttgttgcaggttcatttgcactgtagaaaagttattatttccaactttcgcatggaattttcacagtgttatgtaggtcacaaatagctagaatgacaaaaattcaattataaaatctgtgtaatggagacaggaaactagtgtaaatgctggaactcaaaccatgacaatagaaagatcaagaactccctgcctgtaatatttcagttttcattcaagaaaatcgttgaccagtgtgggcttagtggattggcatggaatgtgaatttagacaagtcagattagagaaagatccagaagtaggtggaagaaagaaataaatcagacacaatcgctggactaggatgacaccttagccccacatttctgaaccctggctgcacagtgaagtcaccagagagctttaaagtattactaatgcccagattccatgcctggagatttggatttaattgctctagggtgaagattgatggtagttgtaaaagcttcccaagttattccagtgcagggtcagctttgggaaccactagcttaaccactgcatttggtatgagagactggtaattgctactagtctcatcaaacagtaaacttggagcttccctaacatcaatcattcacgtaactatttagagatttttgccctgtatcacttacattactaatgtttataacatttttatttaaatcagctcattttctaaaaccttaggctgattttagcttcattctaaacagtagtaactggaaaaatcacaaatgtggtgtgctggttgcatttttttttcctgatacttattaaaatatgcagtgttaacatgagtgtgataccagtacacaagttggtttcaggtgataaaaacaatttagaaaaattaagcaatatattacctaaacctaccttgtatatagatactacagaattcacagtattacaccactccttcaatagtgatcaaaaatatgtaccaaatattcaccatatatagtaagttatcattttgttcagtcattaatttgaattatgttatctctgcactactatatggagaagaaaagttccttagaaaatgaataagcccagccgggcgcggtggctcaagcctgtaatcctagcactttgggcggccgaggtgggcggatcatgaggtcaggagtttgagaccatcttggccaacatggtgaaaccccgtctctactgaaaatacaaaaaaattagccgggcgtggtggtgggcgcctgtagtcccagctactctggaggctgaggcaggagaatggcgtgaacccgggaggcggagcttgcagtgagccgagatggcgccactgcactccagcctgggcgacagagcgagactccgtctcaaaaaaaaaaaagaaaaaaagaaaatgagtaagccagacttatacgagtcagttctaggtcaacaaggctttgatattctctgtgcaatgtgtatgtaataatacttgcaaaattatatcgtactagatttttatgaacaaaataataagttattgcaacaatcaaaactatgaaatcttcaggaagttcttggggctttatactccattaaaacagaggtgtaatgatgttattaacttgctattgataaaaatgtttgggagtggctacttattaacttaatagctatacctagaaaacaatatcatctggtgcaaataagtttacttctttcattataaatgatactgatctttttttattggctgggagatttctctgagcctttaatacgcaaatataatttgtgaatgtaaaggagacagtcttagtttatggaatttttcaagtttggttgattctccttggaccaccagataacgttcccaaggaatttgcttttctactacatggtttgagaaacaccagcctacaatataactttaaaagctattcctgcatttagttccagttatgtggtctataggtatgttgaatttgcctatcagtaaaacatatgtattcttcactctgttttgttcacacagaatagaaccccctttttagcaagttgggtttctgagatgtcttacgtggaaattaactgccaggaaaaatctcaggggaattctttgcctacatgatgtatatcacactttgggagtcaaataaggctcagggtcaaccctgatatagaagggaaaagatctcacaaagttttgtaagccccacttttacatgttcatgggactgacttcctacttgaggagtgtggacataacattattttacagcaattacttgaagcaatagaaaaaaaaagagataaaagaaaaataattctgcaattttttttagaataattactcaagatcgtccaagattttgttctgcctttcttcactaaataccatttccttttttgagataaggtcttgctctgtcacccaggctggagtgcagtggtgcaatctcagctcactgcagcctcaacctcccaggctcaaggaatcctcttacctcagtctcttgagtagctgggactacaggcatgcaccaccgtgccagggtttgttgtgttgttgctgtttgtacagacagggtctcactatgttgctcaagctgcctttgctattaaaagtttttttaaaacattaactttggaaaaccctcatgccatctcatcattacagatatactataatgtatttttttaaatttccctattgtttgatactcaggttcctcttccaaccacaacaataaacaatattcaatggacattctttcatataaactttttattcacccacaaatatctatgtgtctattatgtgtccaccctagcattaggttctaggaattcaatggtgagcaaataattatgcggtctttgcccttgagaacttataccaaagcatttaaaatttcaaccttgaaagtgcttcagatgaaggtagactgtggtataggaatatgaaataagatattcttttgggggaggcaaagtgggaataaataattctgaggagaaagaaagttttctgcttctctgagcttattccatttatattttaatgttaagtaagacttcatatgattgtgaattcttcaaactattccaaatctcagggtgtatgcttaccacgtaaacactctgactgttctaacaggcttattgagaattagaattatttgaattagattaattaccctttggcaagcaaactgcacctcatacaggtcagtgttaacttttccttatgttactcatagtgactgtcttgggactgcccattcagataattttaaaatattctactctgctttggacatttggaaaaagaaaagattgttcagggtcactgttttccattcttagccatggcctgaagcacagtggaagagtctggatggactacaggatgatttcagctcatgcatctgtaatggggatctgataagttttctgtcttcttcaaatggttcaatttgtcaaaaaaataccaccaaccattttttcagttttatttattttcagtcctatcatagtttataaataaggttttgttgacttggaacaaatagtgcatttttgctggaacagaatgggaaaagaaaagaaatggtctccaatctgatgagagaagtgacgaacaaaggaacccacgacaaaatagctgcggaatacaaatgtctgtgtgaaatggcataggggaaattgtaaaagaaaactcctccaggggccggatctcagtaacacagcatcatggacttatttctcatttgcatgtacatcatttcatgtcttttctctgaaagtaaaataaagtcttaaaacttttctgctggggaacatattaaattatggaatctttccaaccagaagtcaccatggtgaagaaataaaaaaaaaaaatcaagttatgtatattgcctctaaaatgaccatgactatgaatatgcaaaagaaagaatatgagttaacatgctgattgcaaaagataaaagcactgactgtcccttaataacaataatgcctcaaattggtgtgtttttctctgaatttactattaaccataaatcatcaaaagacttaatattttgcctggactcatttgtgtttaatgttccaagcagacagagaaagagacaggatgtttttgtaaagaaaatgatccagtgtttaatgcttttcaaatctcattctactaacagtacatctttccctaaatagcttacatttttatggtcattccatcactgtgaatcttattgattaatagtactcttatttatcatgagtttcaattctcaagaactttatctaattgaggtaggtgtttaggcttattgaaggtctttttttgataacttatataaccagctcaacaggagaggagggtttctaattgccaggtgaaggaggactatataaaaagtaggcaaatattatggaaaaccttttctctaaattgtctagctaatactaaagaaggtaagcctgggccttatttttcaactgtagtattgctgtatgctctagttggatttataggccaattccaaaccctctgctagtcttttgtgattcttaccttgcaaacatctagagtcttggttttagattttttcttgatactagattatttagattctagagaataaagctagaacacatttcttattttataattctatgctggatgcagcagatctagttaaactttttttggttgcacaggacagaagcacatctcaaatttacttaagctaaagggggatttctttatttacatagctaaaaagtgcagaattagaattggctgtccacatggctcgatctactgggtcaaatgatgtcaccaagacctagactgtctgtcttctctgttgtcctctatgttggcctcaattttagaccccttctggtagaagatggctgtcaacagagccagattaatggactcctaggttcaagactgcaagaaaatgaagttcctctcactccacacttgaagagatgtcctgaactttttgtgcccaaacccaaaccaaacccaaatatacaaggaggaagaaatactagccccaggtcatgtgagcatccctagagctgggagtagaacaagtcccatttcaactgctttgacttaaaagactggttctctcagataaaatttggtctgtaactagaagaagaatagatggaagttaggcagcaaataaaataataaataagtcaattaattaaagaaaataaaaccaaaacaaacacataaacatacaaatgtctactacaatctaaacccaggagggaagcttaagtcttcctttcatgatttcccatagaaaatcaataacatcctttgctatccctcaaaggagcccatagagggctggcagaatagcagatatctgactctcatttaagttaacttgcagagcatggatccacattgtgtttgtcctatcgtcccttttctttgctagtttgataagaaaagttgtccaacagggaaataataggaaaacaatgacaaaataaaaataattcttatttgtagagcttaaaaatcagtctctcataagctaactccattacacgctttctcatcattgcctgaatatttctctcagccaagagaaggaataaaccaacccgccaaagctgcacactcaagttttaagtgcgctggagagtgaagccaaatagaagtcattcatttaagagctgcagtaaagtggcaactgcgttttggttgttgccatggttcagatccactcaactttaaatttctagtcattctcagaataccccaaagcattctacctttagctatctcaaattcatttatttctgactattttattgctcacgtactccgtgatgggcacagtgctggacatctgggaagatggcactgcctctcttcttcgtcacttttaagccagggttaaccaccctgtcattgaaatactttcttttattggattctggttgtcttcagcatgtaactgacaactaaagccatgggcatggataagagtgtagagggaaaagagaaaagaaaagaagcaaagaggagggtggtggagggaagaggggtcattgaccataagcgaggcattctaattaaaagggagaacatacaagaacttcaaatcctagcacctacccactacacactcccagtttcccctctgccctaccacccatcctcctgatgcttatcttagataaaaattctgaaatgggtcaagcaggcccagctcggcactgagtaccagttcaggagacagccaccaggaccctcagctgacagcaattacaggtccgagacattttcctctggcactgtattgtattaacttttttttttgtttcctttaaattacagggtgacctgctttcagttgggaagttataaccagtggccgaatgagaacaatattttccctataaaaagaacagaagagccaaggattcttcaaagattcctgggcactgagaaaacaagtaaatacaaaatttagctatgacaattacagacagacatcaacaaaaatctttttaaaaagataaactttcttcattaaaatataatttgtttgatctgtatttatatatctgtgccctgctaccgtatcattaaaaatatttgaagtcggatatacgatgcattaatttggcagattatcacattatctagttaactttatcttacatgttaccttctgggccagtggtgctaggactccgatcaaactcacttcacagtaaattagttcatattaagaaatatatctgccgcaaagtctatttggaccaaaaacaaaatagcaataatacattgcagccgtaaataaacacatagcagattaacaagggctaagtgttgctcttgtctggcactgggagttaacagtatatacttcatgataactgaaaaattggcaggaattgagtatatgaaaactacgtatgaagacaagcaatacagcttttaattctaattgtttacaaaaattataaagcattgttgggaaattgttaaaatgatttgaatactaccaagggtttgaaataaaactgaaaaaaacatcaaaggttattcaacaataaattattttacaatgacaagagaatccaaaagcagcatctgatgtatcttaggatcccaaaatttcaggagccgtgaactctaactctaaacaatgcattatttatggactttccagtctttgcttaaatgtctctattcatgagcatcccttacttctccaaagcaatcgaactgcatttcacatcactctgaaggaaacagagagggagaattcctcagctggagttcaaattggcctttctacagttctttccgaatggccccaggattcttttctgacttcatgaggacaacacttcagatgagagagctcctctgtgtgcatcctccaagtttatctgctaaaccaagataaacatccccggttcctctttttaagtttttaagtgctggagtacatgtgcaggatgtgcaggtttgttgcataggtaaacatgtgccatggtggtttgttgcactcatcaacccatcacctaggtattgagcccagcatgcagtagctatttttcctgatgctctccctcccccagccctactcccctgacaggccccagtgtgtgttgttcccctccctgtgttcatgtgttcccattgttcagctaccacttataagtgagaacatgtggtattcggttttctgtccctgcattcgttttctgaggataatggcttccaactccatccatgttcctgcaaaggacatgagcttgttcttttttatggctgcatagtattccatggtgtatatataccacattttctttatccagtctatcctgatgggcatttgggttgattccctgtctttgctattgtgaatagcgcaacttgctttatttcttttttcaaattcacataattgtaaatggcaaggctgaagttctcttaacattgcttcagagttttcttaatgaggatccccaaatataaaacctaatgcttaaagagcagcttgatagaaaatacaggacacaagttttttacaaatgaaatttaatttaggatttaaagataaatgcctgacaaatctagtcagttagatgtagtaagatacagataatgtaacacataataatatataaataggccaaattacacatatgcgtgtgtgtgaagagtatttgtgtatacaagtgtgcatatatacagagagagagagacaatggtcctctccatttttcccggaaggtgcacccagtttaaaaacaaaagttttggcaaaatgttaagtgtcctcactaatcttcttaagaaatcctaaagatcaataatctcccttgagggaaaactggatataaatgctgaaaatcagtcctaggggtaggaggggggggcattgttttgggaaggtggggcaggaaaagtcaaattccattggaaaaaaatatttaatttggcaaatataaattgagcaattaatatatgtgccacctttgtgggcatgagatatacaagcaacagacatcataaaacagatgtcagaggccagtacaaattaaacattcatgtccctttcaacaagaatgcttgttaattcaacaaacattcactgagcacctcctgagcaaccacactgttccgagaaatagaacaccagtgtggcaggaacagagtgagcagtagaaagctgaatttcaaatcattcgagatgattctggaactaagtggttgtgtagcttcagccagtacagggaaaagagcaaacctagcagaaggagctatttgctttcctaaataatttggtgttctggtagtagtaatcacagacaatattaataacaacccttcctgagggtttattgtgtccggacaatgagctaagctctttacaatccttatatcacttaatcatcacaacaacactttgagagtaattattatttctattttacatgtgaagaggctaaagagtagttatccaaaaccccacagctgatgaaagtacatggtaaattatttgcaaatatggtcacaattctccctaaagccatgctctttgcaatgtaaccttgcggcttctccaatcaagaggtgaaatctatttcttcactctctgaatcttgttggccttgtggcttaccttggccaaacgaatgcagcgtaagtgacagtgtcccagttcaagcctcagtcccaagaacctcaaggaatcagaacttgcttctgttctgtctcttagactcctgagattgccatatgaacccagcccagccagcctactagagaatgagagaccacatggggaagagcttaccaggtgaggtcatcttagactagacaatactaagtgataggccaactaactacagaagcataaaagagcctagcagagatcagctgagccctgccaagccccgacccaggccagaattaccatccagccattccgtagacttgtaagcaataataaatgttccttaagacaataaatttggggaaggtttgttatgaaattgaaacccaagattatatgactccagatactatgcactgaattgctattttttgtcatgtcaaatattgaaacagaatcctgtaccttagaattatgagagtttctatggcagatagacggatactgcatttttcatgattttgctttcttcccccaatcctctacaacaaaaagtccatcttgtttacgcaaattgatttttccgttctgaggttgtttttcctcctgaaatcctcctttccagctgttctgggccaggggtaaaggcaaagccttccaacaagctttttggcattacagagccgagagccatctgtttggctgtaggctattcaccatggacctggcaagtaacacgtttctgaccagtggatgataatttgatagctcatcattacccaataaatatgctaatcatcacccctgaagtgggactaaaacagtaatttggttgcaaaacatttagtgcatgtctagaagatacagaattaatgtgattcaggcttaactttataaaactgtcattttgtcatttatcccatttcacttgcaaccacactttgatctatccatgatcatgcacaggagattaaatggtactccctgttttctgataaataagtagatactcactttctctgacatgttatcattttacctctttcccatctagctttgtcaggataaattttcctcttcgatagttcttatagattaccctagaagtctgagagagaataatgagacagaagtttggatcaagaaaccatttattcatttgtccagcatttgaccatccaaattgtacagtaaggaccttatacttgcaacataccttaaaatttgattctgaaatctattaagccacttaaattgaataactgttctaataaagtaatcataatgtcacctacctaatatttcaaataatataaaaatgtttaagccattgactgccattgcattttaataaagaagatgagtctaaaaatcattacattattttccttaatcatactatattttaaatgtaataattaaatttaataattaaatgatttatttctaactcaatttatttctgataataacctttaaataaaatccttttatttaaaaccttttatttaaagggtttttattataaataaattagcaaaaaatgaggacctaggtcttgtgcattacctctaccttgactatttatttcatcaagtacgtaaacagtcttagaatttaggcagtgtacaacctgtaagactgtacatggcagtggatggaaataagtggttgattacagccatggaaacttgtcttattctaaagtgtagaccctttaaaaaataagtaaactcaattctgaatggaaaaaaattgatttttgagtgcacattgtgtgctaaatattggatgcacggcatctcacttaatgcttaaaacaactcactgcagtaggtattagtgttatctccatgctgtaaagaaatagaaaaaagttagagatattaagtatctcccccaagttcatccagctagcaaaggttatgattcaatgttagggtcagtccaaagccattttctgctttgggaagctgagatgggaagtcttcagggaggggagaatgaagtagatactctagaaaagaagcagagttgagagatgaagatgtgagtcttcatttaacgaggggtcaaaccttggtttcccaaagactgtgccactcaaactgtctataatgaagagacagattactcccaactccaattcagctcaaaccaatacttttttgcaaaatatgataaaaataaaatactaataaacaaaattttaaaatagctgaaaacacaaggattccattttaattattagaataaaattattctagaaaatagctataaaagtctctaaacacctttaatatctccccttctcttgtgaatgggtagaaattagtgatggaataggtggagattagttagggaattgacacaggtttgaggaccatactttgagaagcacaaccccaagttatctgagctgttcttcactcccagaaaatcaacttgccttattccagaggtcaacactcaaactctaccctcaactcctaaaaaatcaaattccagctattagaacttcagcagtaggaaacagtctggtgcctactatacatagatatacaaatgaaggaccactaaatagagaaggctgagcgggtcctctgagcgtgatgataaagctgaaacattttaaaaacagccttagggatgaaaatcttcaaagcaacataaacataaatttaaaaatggctaaacagagtctacatttataacatttgcttattaacttccttttcttccttcacagactttcaaaaatccctatggctggaaaaggcttggaggtttctctctccattacgattcatgcacctgcttcctcttctgcaaccacccctaactttcctgcagaactaccattagataaataaagtttattttatttcaagatttttaaagacaggtattttgtgcttctttattttcttttttcttttttttttttaattgaggggtcaggggtggggagaatcaaccaaatcaccaatcaaaggctagttggggggatgaaaaggtgggctatggccatgataaaaagaaaagacccctgtattgattggttagttagctagccagctggatcccagcaacattaaacagagaaatgtctcaggagaatgaatgggatacttccaaaagaatctaaattcctcagaagggcctgcaaagccatagtgaatggagtccaaactgagaggggaactgtccaaatggagaagcagcttggtgtattcttctcaggctcccaaaatcccaagtagaggggagcatgccctttgctctgcccactagtccagatatgaaggaaaggacaggtgacattaacttacaaatggccatcggggtcctgcaggccagggtaagggctctaggacagtttgtgcctgcagcaccccctgtagtttacaaatgagcctcaggtgtctccaagcctctcctccccatcccatccttttttcctcccacccacttctcccttgcttctttttcaacttttcatcttgaaaacattcaaacttaaagaaaacttgcaaaactagtaacctattgactaagatggattcattagttcaatatactgctcatctgaatcactaattttgtcacatgtgctttctccgtgcattatgcgtgtacacatacataatacatgtatacatacatacatgtatacatgcaattattttgctgaacaatttggtctttcatcctaaatacatcagtacatatttccggaaaataatttttttacataatcccaattcattgattaaattcaagacattaatatggacataatactgttatctaatacatattccatatttaagtttcactaattgtcccaataacatactttgtaccattttttctttgacccagggtccaattcagggttctgctctgcatttaattgtcttgtctctttcgtgccctcaatctggaacaggctctcatgacattaacattttctgaaaggcacaagagagttgttttgtagaatagtcttaaatttaggtctgtctggtagtttccttacgatcagatcggagttacacatgaaggctattcgagtgatattgtgtctgtctcagtgtcccaggagacacacaatattaatttgttctattgttgatgttaatgctgatcacatgagtgaggtagtttctgggaggcttctctgctttaaagggatcttcttttctctgtataaaaatgatctgtgggaagattcattgaactatataaatgttctgttcccccaacaaattcatccagtggttttaacacaaactccttaatttttatttgtattgatgggcaaattgtttatctccatagttctggagtttaactgcagcctgtgccagccctgatctggtaactcctctcagtttattgcacacaatgaacctttccactcattttgaaacttacttgatattttaatgtgagggtttagagaacaacccaccctcaccctttactactgagtcatggtgacataggaggaggccactactattttgcaacattacctcttttcccatttcaccccgtggatatgaagacctttccctatgaaaacgatggctgctttttagaaaggatgaacaaaacaggtggggaaaagctctcatattcaaaaatcaaaccaagtcccagccagtctgcgaagcaaaatgcccactcagtctgcaaagccacagcacgacatcctgctgactttccagcaaaattaattgcaagaacctggcaggtctccaaacaactgccgttcttcccttcattattgaaaaatctctgctgtcacttcttaatcagcgcttcgttcgtatttctatagactgtactttgcttgcacttagggaggaattggtgcaaataccacttttactcggcaattattttgcataaggatttaagttggagctcacagtatggcaagatttggaatttagatagcaaaaaactctcagagctctttggaaaacaagctggacttgcagttacactgggtagacctgtggaaactctcttttaacgtcatgaaggtgaaacctgcaaatattggtacataaagtgaaatcagcaactgctctctttttttcttttgctaggggtgcaaaaatgagagaaataaacaaagaactgatgtcctcaaagggaaaatactttttaaaatttattgggaagtttttgactggcttgttttcctgcttgctatgggaacgtgacaaaacaagatgtaacttgtttatttccagaccatgtcttaatctgccaaccctttcctcatctgaaaaaacaaataatttaaaagaagcagtgaaatgtcattcgaataaagggctgtatgaccactgatactgcagactgagaaattaactaatgaagacaggaaagagaaattttaaggagtttgatctaatgacatcgcaggaaaatcctaagacatacctaccaaagctaggtaagctgaggggtttaaggaagacatgaaaaatgcctctgttgataaacaagacagataattcaagccaattatttttctttggaaattgtcatagcccagctgatggcttcaggggttggacagtctaaaactctgactttcaaataaattacttttagttgcaaaaaccatgattacttttgcaccaacctttaaaacggccagtggctcaattctgttttcttaaacattcatttgagataaacgttttttaacctctcttagaaagaatgaaattagagtagtcctgactttagtaaggaattgacaggtcatattttgtttatacaaaaagacatagtcaattccattggtattaattgagcacatatataggttatgttgacataatgggatttggagaagtcccagacacctggagcttgttaatttatttggctagagttaccgctggccttaaaattctccaatggctcctctttacagttagaatggacccaagctcttttccaaggcatataagactccctaacctggcctctgctatttgtcagtcactcttcattcacccactcttcccctgaagttcacaatccttcagccacaagggatttctctcaatttcttgagcatgccaacacatctcgggaattgtgcatttgctgtttctactgcctccatagcaagattcttgcatgcctgctcttcagatctccactcagaaaaccttccatgctcacagtatccaaagccccttgcccagccactctctctctgtctgtgaacctgttctctttataccacagcccccactccctacaggagatctttttgatcctgttcactacagtatctgcagtacttggaatagaacttaataactgtatgttgaaataacaaaagaccaaatgaatgactgtataaaatatgaaggtaatatgatataaataacattggattctgcttactactagccacctctgtcttgaattttaagtattcaggatcagatttaatgttttccaacagattgagagttctttgaggctggagattacaccttatatattcttctttccccctgtggtaccccttgttcagaaaagtttgctaaatgtctacaggaaggaaagaagaaaggcggggcgagaggaaagaaagaatttgtcaccagatggacaatgactttttctgcggcaacacactgaagcagacaaccacaaatttgtttctggggcttgtacaataagtattccactctcagtattaattcagagcagagaagtgctgtcaagtgtctgagagagtgtggaaggtggtattggagaattctctactgggcagctcctaaaccatgggaaggcaaagctgaggaagtgagagacatgctttcccaagagccccgaagaaagatcttttaaatcagggtaccagatggtctgccttattaaagggtgcctctcaaagccaaattctttttttattcctttaatgctcaccttggtgaaaggtgaactacttttgaatcaatctctctaaggtctcctgttttcagccttaacctctgttcaaaagcaggatgttgaacctctgctgtcttccaggtgtgtatgaggatggagcagacacatcctcagaagccggagggcatcatttttgttcataagagcaaagatgcatctcagagctgaggtatgaatcccatttccatctaaagcttggctataggagacagcacccaaactcctgcatttacttttgaaacatttgctgtgttcctataataccactctcctaccaggatgctctctataaaatgccctagaatggtgtcccatcatccattctgtaaagacagcatgatgtagtaaaaaaaaagagatattgtctaagtttggccacaaagtatctatggcacctggaaaagtcaaatcacctccatggacctggttacttgaagtatattgaaatataaaataaaaataaaaacatgatataaaagtacagctataggtagcttcttctgatctcaaagggattccttattgtttggtttgattcggtctaactcagtggctttccaagttctgttcctagactggcagcattagtatggtctggggaattcgttggaaataaaaattctcaggccctgtcccagatcagaaactctgaaaataggacccttaattctgtgtttcaactggccttctaggtggttctgatgtaagctcatatatgagaaccattggtctaaaagaatacttttatgggccttgttatgcacatatgtatgtggctttcctacttctgacagctctcattaccatctgttgtcctcagggttccagtgactctcgtgccactcatctctaaggacagcacacatgacttcactaagccaatcagcattattacttctctgtctatgtaattggtacacgataggcatttgggtgacgagatttaaaaaaaaaaaaaaaagggtttcaggattttgctggaaaagagacattcccagtgagaaagtaccttgtgggtaacagcaatgtggggaccacaaagggaactgggtttatgataaaccagacatcatggaaggaagacgggacatagaaggaaagtagggctttgaagacactgttagtgcgggaccaagctgtgcttggtgtcaattctactgcagctctatcttttctgtaacaagagccaattagtgtcatttattttttaagcctgtttgaaccatgtctggtgtcacctgcaaccgagtattctaactctaacagtccactttgcgtgtaaaacatgaggattcctctaccctggtcttgagagagaagatgaagcaaagcatgaagaaaataaagtattccccgcaataagaatatggagttgttttctggctaagacaaaaaagaacacagatagggtacgagatgggggaggtaaggggaccagaaagaagaaaaatacttgagaagaggatgtaagtttatgactaaagttagatacttgtgggaacgtggccgttaagaaatgaccttcagtggagatgggcagatatattttcagtaacagagttctaagcatgttccatgcactagattgatttaaccctcacaccacgcttatgtgtgaatgacacataagaatcactcaaggttagatgtgagaggtaaaactgagatccacagccaggcagctggctccagagtccattctcttcccattagggcacgcttgtgcacctcagctgaaattctctttagtgcctaggaaaccatccccaaaagtctgctctgccactcagcctggcttagtgctgcttggagaagaatgaggagaggcaagtgggtcctagcatggggtagagccatgcagaaagattgtcatggcaccaagggcggtggtcttgagacaggcagtggcagaaaaactggcagcagcacaagtgactcaggagggattgtgcaatagtcgacccctctcaatcacaaaaaagttctgctttggagggaaaaagggaataaacgacagaaataaagtttttaaaaatgtgtgtttacataaggcttctacttggtctaaacatctacaagcctgtgcatctgaattcttccttgatgtttaagagtctctgtaatatgaataggccttatttcagaggctaaactggtggaggaagaccaaatttgacttacagtatgtttattcatcctgcaaagggcttatcaaaaaatataatttacttgtagtatttacaaattgggaagcaacatagaaaatccagatttctagcttcccttgaatctcagaagatctagaaatactggacctctattcctacaagaaaataactgcccaggaatgagtaagggctggcccctgtacacaggacttgtggcctcacagtttccactactgttgttatattctgttcagttttattcatttttgtcacccgtctgtcccctgaactcactaaaagttgcaccctctgcctgacttagaacttggtctcaaacttccccaaatataagattgtgctagtctgtctacacatccttctgattcatcctataattgttcctctctgccatatatttggtcacaatctatcctataagagtggaaatccatgtctttccttcctctttcatctccacttccctgaatttatctgagcattcaggagccagattgtacccaccatattcagaaaagcttcagattactttggtcaatgttgggctcttccttttctgatcgtggaatttatttttcagtgaagaattccagatcatatatgcaatgatatgccattttgttttagcatttctcttccttgaaagtggagatagagatggtaatgttgcagaaagtgtcaattaactctactaagggtactaaaaaggaggtaaaacatgctaacttttacctagaccagagtttctcaacatcaagactgctgacatttgaaaccagataattctttgtcatggggggctgtcctgtgcattgcagcacgtttagcagcatcctcagcctctacccactagatgccagtaggaaggcccccagttttgacaactaaaaatgtccccagacattgcaaaatgttccctaggtcacaaaaccacccctggttgagaatcactggcctacaggaactcaaaatctcactgaagacataagagtgaccaataagtagttagaaaatcatggcagcagacaatggttgtatctgggcatcacattcatcccatcttctttcagtgacaatttttctgatttctttaaaagaaactatcttttcttcttctggacatagtctggaaaattaatcaatgtgtcctgatacttattccctttcagctgaagggaagactcattacctaagtctgggccaactaggcacactctcccttgaatttctctcaagagtggcaaataggactcaagtttgctgaaattcattcactgcagaaggagcggttgaatgaaactgtcaagcagtctctgcaatcaacaccttctggaactaatttctgttctttctaggtctggttccttcaactctttgagcattcatcaacccttcagataaagtcctttttttagttatgttagtcaaagttggtttccgatgcttgctaccaaagaatccttactgatggaattactcattctaccttagtaagataggaaataagaaaacagagaagtctgaacagaatctaaaacttaatatatgaatatgcacacttatataaacaaatgcaagtgcattatgatctcaattaatatatctcattatatatatgtgtatctaaacatgaagatacatatgaaaacttaaatgtcaaaaatagttataactgggacatgacattacagattatttttataatattttctatatttttaatttattaattttaatgttttcttatactttatatacaagtctattcattttatcttaaaaaacactttatgcatttttaaaagaaacatctaaaatgcccatagctattgtgtatgatatacgctatttcatgttttatctgtcaaacatgtagtgctctgctaacagctgaacctcatttgaacaaaaaatgtatttattctacttatctgaaatcaaggtaactctcatagatttgaatggccctccttttttctccacttttacctacaacctctcacaatatgacctcaagacacttcaattttaaggtcagatagatgcactaattaatacagcatttttactaattactgggagtttatagctataacccttaataacttggaatatttgctatgttctaatcagttaagtgaaattggaaaaagccttgataacaaaagcaaatgaaaaaggaccacattgggagacagatatataattaacaagcccctttatctaaactttcattaaagacaaacaaatgttgagatgtaaaaggcatagcttttaattaaagtgtagcttcctttcaagacctgctttgccttgggcaaacatttgtcaacatatgtcccaaaccatcactgcttcccagtttggatagttgatattttagctcattctcaagtcactcaaagtaataaattaaattataaatgcaacaacaataatgaattaagctgagaagtgcagtataatattttgtcactaaaaaaaaaaaaatgtctctttggagagataggatatttaaatattcactgtgtgagataacttctttatttccacacttatcccctcacagacttccttcaatatcaaggacaaatattctctaacagttttaattatttgctttcaagaccgggagaagaaatacctaactcttctatttaaaaaaaaaaaaaagttttatgaaccacaaaatcagattaagatggaaaaaaaaatgtgcaaattagccctgccgaaaacatgtagccaggctgcagagaaagagggcaatagggtttctggatttcccccagtatcgcttccacttcttacatcagtgcaaatatcccggctgctctcacctgcctttgctctgtctgggtgagcctccactggtgcccctcagttggcttcatttccacctgatgttggcgcatttccagtaagtccccgttggttaagcattaacattctgtttgtatgcagcaggccctgtctgtgtcagcctttatcacactttcatattatcttccctccccaaaccgtgcaatactgtcattcaactgtataaccagagaacacagcagggcaaccctgcaatctgttgggaggtagtaaatacagggtaccacttaagaggatgtggagtcagacggaccaggttcaaataccgactgtgtttcttattagctaaatgaccttggcgaaattacctattttctccgcctttgttattttctctgtaagaaggagggtaatgataccacctttttgggagcatagtgaggattaatcaaagggagtgaacgcatatatgaactgcctagcacagtgcccagcacacagtgaacactcagcaaccggcagctttcctgatttcccatttatatattgagggcaagtgttgtacctagacagacatctgcctacgtgatatgatgtgaggattaccaagtgcacctatctctgaaattctggaatctatctcaggacctcaaatacccactgtttaagtcaccagaaacttttctaatagcaggagactcctatataaacacaaaaatatgaactaggaagaagctcacattaagtcattttcactcattaacagcaattactttatcaaattcgctatcccagtcaactagcacattcttgtttcaactcagcaaactcatgctgaacccttactagtgcaagagagtgtgctaaaagctgaggagaaaacagttaagtaagagttgatccctggtttcaagggactcacaaatgaatggcaatgacagatgtgcatggatgtacacacaaaatgtaaggaacaccattagataggaaattgttgtgcacacatgcttttatggtaagaaggtagaaattcctttctacataaaagaaaccatacttgagctgcagcacttgttaatccatctgtccatcccattcattctatccatctatccatccatccatttatccatccatccatctatctcattcatctatccatctatccattcatccatctgtccatccatccatccatccatccaacagatatgtattgatgccaatgaggtacaagcatatgttaggcactcagttaattaaaatagtgaataaaaaagatattaacactgtctgcatgaaactcctagtccaatatggtgacaaacacacaattgggtatagaattataatttggaagaggagatagcaaagaaaatgagtatgttttatgataaagaataaaagcaggccaggcacagtggctcatgcctgtaatcccagcactttgggaggccggggtgggcagatcacctgaggtcaggagtttgagaccagcctggccaacatggcaaaaccccatctctactaaaaatacaaaaattagccaggcatgatggcgtgtgcctgtaatcccagctactcaggacgctgaggcaggagaatcgcttgaacctaggaggtagaggttatagtgagccgagatggtgccatcgcactccagcctgggcaacagagtgaaactctctctcaaaaaaaaagaaaacaaaaaagaataaaagcagaaagcataaggatttcaaagaaatcctgtggaagaggaaccatttaaaaggagatctggaggaggcccaagggttgtccatgtgataacagagggaaaaataattagggagaagaaataggggcaagaaaacaatatggcactgatcaaagacttggaaagatgccccattgtggctagaaattgatgagtaaggaaaagtggctggagttgagattgttcaagtgggcagatcagatacagccttgaaggccttgctaagacattgggattgtactttctcccacagaatagaaggccactgcagagtttgaagtagagggtgtgactgatgttatttagtttgcattttaacagtttttctttctgctgtgacaagaatggattagaggtagatataatttatggaaagcaaatacactgcagtcatccatgataagagatgaaatcaagcataggaaagcctcatttatcccatctgcaaaatggggaaaatacctgcaaatagggttgtttgtgaagagaaactaagttactacacataaagtgtttagaacagtgcctagcgtataaaacagattcagactgctagctattatagtcatatattactatggtcatgattatgtggattaacaaatgagaattaatctgttacaatcaggtacaagaagtatcactgcccagttaagtaatttgcccaacaaaggacatgaatagacatttctcaaaagaagacatacaaacagccaacaaacatgaaaaaatggtcaacatcactaatcaccagaaacatacaaattaaaaccactaggagatactaccttactcctgtaagaatgcccctaattaaaaagtctagaaacagtagatggtgtggatgaggtgaaaagggaacatttttacgctgctggtgggaatgtaaattagtacaaccactatggaaaacagtatggagatttcttaaagaactaaaagtagatctaccactagatccagtaatcccattactgggtatctacccaaaggaaaataagtctttctatgaaaaagacacaagtacatgcatgtttctagcagcacgattcacaattgcaaagatacacaaccaacctaagtgctcattgactagcaggtggataaagaaaatatggttatctatataccatggaatactactcagccagaaaaaggaataaaataacgtctttcacagtaactttgatggagttggaggccgttactctaagtgaagtaactcaggaatggaaaaccaaatattgtatgttctcactaggagctaagctatgagtaggaactaagttatgaggagataagctacaagtaggagctaaactatgaagaagcaaatagtaggagctaagctatgaggaagcaaaggtatacagtgagtgatacagtggactttggaatttggtaggaggaggttgggaaggggtgaggaataaaagactacatattggctacagtgtacactgctcgggtgatgggtgcactaaaatctcagaattccccactatagatatcatccatgtaaccaaaaaccacctctaccccaaaaactgaaataaaaaataataattcaaaaaaaatcaagttagtggcaagacagcttaaacacaagcaatctggctccagagctcggctcttaactgtactattgaccctctgatgcacacattaacttgtgctgtataggcttttgtcataggattttaaaatttaacagtatattaaaacattttttcatttccataaaaataatctataacatttttaatatacgcagcttaatttatttaactgtatgcagagcatagagattggttccaggctgtctgatgttataaataagtctatgatgaacatctcattatctttttttgacccgcaatgatgatacttttcaagagctatttcttaggagagagattattggtcaatacgcgtgaatattttaagaattttgccatgtgattctaagttattctccagaaatgtctcactagtgtctactattacaaacttttctactgattcttctctctggtcacagattcagccacgaagcaccattgtggctactcccaggaccatatcagtaatgcctctgaatgacttcaccctctttctttctgtttcactcatgggtttttgtggcagaggtgcttcagagtggaaacccttagacctcagcagatagagaggcactaagagaggagctaaggaacatacaggaagatccagagaaaaagggcagcttttctcccaacctgctctgtgtagacttgctgcctgtcatctggtttgtccttaaaagcagccagttttctttggctggtgagtagaagtcgtcagaaagattcaaagtggatcagagatttaaagagatctcagcccttggctaaagatggctttgtatttgtacttttctgcaaagcttgttaccctaaacaaactcactctgtgagtaataaactcagagaacatggatatcgaatagacattagtggtatcagtcttatacccctactctatccttggtggaggcagagtgtggctttccattttcatccctcaatttttgtcttttaacctctttgatgtatgtctgaaaaatggctgacccaaaacactagttctagaatcactgtgactaaatactcttggatttgaatacttacaggtttcagaatttttcatctacactcctgtactttactaggaacgttttttttcctttttaatggcaaaaataatgttttatctacttttgactattttctttctgtctgaatcctagtttctcagaagtaatcaaataggaatagctcttcaaattttctagtacctccctcaaaagccctcaggcattatttcagagaaaaaaataaaaaccaatgctctctcatgagtcagagtgtcacccagtgcttaggagttctttggaatttctgttcaggttctctaagttattcaaatgacaataatgaatttctaaagaagggaaagtttttactgatttttaagtaaacaaataaatgtatcccatctgtctataagagttactttcagccacgttttttttcctcttagaaggacaggatatgcccctgctccccccgcgcccctgccaaaaaaaattaccagcaaacttttaaagaagatggcttttatttaattttgcaaatcaagggaaattgctgagcatttccaaattgaggctggatttcttgttctctaatttagttttggcatttggaatattggtaaaaacaacattattggagttgtgtttgtattgtgcatattagtgtaagggaatgaatgtgggctaaggaaacaaagatgatgagggagctggattcgcaaataaatgtcatggatgcaatcacaatacttaacgtccaaagcataaacttccaaatttacaataaaaggaaaaaatacccgccacataaaatttctacagattaagccagcactttacgtgtgtgtatgtaaatatatgtatgcatgcatatcacatgcatttcatgaaacatgtaagtattaaataatttggacttcaaagtaaaatagcatcatcaacccaaatctatagtctcccctcgctgcaaaagaagtaatcaacagagtaaaaaaattcaaaaacagcctatagtagacttagaaaatagaatatcatctatgtgctagaaactttaaggaatttctacccacaattgcacagttctaatcagtttgaaaaaggaagaaagtggtgacttaattcccaaatctacataggagttttatggattttaacgtggtggagtctgtctcacgcgcatccatgtgaagagaccaccaaacaggctttgtgtgagcaacaaggctgtttatttcacctgggtgcatgcgggctgagtccgaaaagagagtcagcaaaggatggtgggactatcattagttcttataggtctggggatgggcggtggagtcaggagcaatgttttgcgggcagggggtggatatcacaaagtacattctcaagggtggggagaattaccaagaaccttcttaagggtgggggagattacaaagtacattgatcagttagggttgggcagaaacaaatcacaatggtggaatgtcatcagttaaggctattttcacttcttttgtggatcttcagttgcttcaggccatctggatgtatacgtgcaggtcacaggggataagatggcttagtttgggctcagaggcctgacagtctgaccttacacaactccccaggatcacactttattccaaggagtgacagcaggtcatgaggctgaaggtttcaatcagcattgggctgccatatcagatattaaaagcatgacaaacatatactaaagaaaattcattgtgtatcagaaattcaaatttaactgtgtgtcctgtatttttatttgctaaattcagcaaccctaaaccagcataacacagaagatacagaagttccccttctgtaaaagtagaaaactacaaccagccataaaccaagtgccaacagataaaaatggttaggactatgaaaagatcctgcaaatcatcaaaaagagatcaatctctgatactatcaaacaagtaggaaaggattttagagactctttaatttatggtttcaaaagaccctatagaacactccattttataaaactagaagcagctggtacaaagaaaaatcaaaatacgcggcctagtgtagaattaccaaacaggtaaagtaaatatgtgaaaatttctactttgtttaaaaataaaaacccacaggtgtgtgcatatattaaaaacgtggcagtgtatcagtgttcctggctgcaagtaataaaaattgactggctgatcactgtagacaaagaatctacaaaaagcctattgagaagctcaggaaatcttgaagagagttgctggaatagggcttagaaaattagcaagacatggctgggtgcggtggctcatgcctgtaatcccagcacttcgggaggccgaggcaggcagatcaagaggtcaggagtttgagatcagcctggccaacatggtgaaactccatctctactaacaatacaaaaattagccaggtgtggtgacacatgcctgcagtcccagctacttgggaggctgaggcaggagaatcgcttgaacctgggaggaggaggttgcagtgagccaagatgcgccactgcactccagcctgggcaacaaagcaagactccatctcaaaaaaaaaaaaaaagaaaagaaaagaaaggaaaaaaaaaaaagaaaattagcaagacaaaatggaagaggcaggaacaagaggcccgctcaaatcatgccacatcatcaatcagcctcaaaacagtgagcaccaaaggtggccacaccagcaacagtcactgcagctctgagctccaggccccaacaggtgcacctccaccaaagggccacctctcgtgttcctggaactaccatgttgctttgctgctgctgctgctggttctgtcaccagaactctctgcagtccctggtccttccaatctctactcccaattcaaactgggaaggcttcatcccattaggctagccagggtcatggctccacaatccagctgtaaaagtgagtagaaaagccaaaatttggcaattgaactcttcaatatatattatattatatatgcaaatatataattatatggttttatattataattatataattagtttttttaaagattactttaaaaaacttcaaatgtctcttacaaacctaatgataattatttctttccatttaatgttttatatccttttggtagtaatgaaacattgttcacagttttatttttcatcaggatattaaaatattttttctgctcataaatttttttcaaatgtgtcaaggaaaattccctcaagaagtagctgtgcacagcagaactcaacatattagaaaatattactgatttctcttagacaagctgcttaagagggagtgaatgatgtctcttcctcacataacattgtacttggtacagtaaaggtgcaaggctggcaagtagaggctccatccattattgtctctgtagtacatataccgtaggataatgagagccatcaggataaaatgtggcgtgcagcccatgtaaatcaaccaaggtgagtgaaaacgctggagacatttgtatttgttttgctggtggtgtgctccccgcatcagcccagaactcattatggtcttacttatacagctacagagatttcattcaatgtgtatggcaatatcatattatgtctttaaagaaggaggaaagtattagctaaagcacaaacaggtactgtttgcattaacttgagaaagataatcatttgcaaggaacatttttaaaaaacaaaacccagatcctttcataagaaccacccttctgtgaagctttggactgagaaatctgagcttgtaatcagaggcagttgcagagcttgggaggcgtacctgaaagtcaaaggtgaggcaagttccatttatcttgcaatgtcgcatcggtctccctatagaacctcatcatcatgctctgcccttgtcatgttccttttcatttgcagacacttggaagcagccctaaccttattatatccattattagttactagctacggataattcaatttttcagttcatctgccattgcttagaaaacatcacatcattagtatttctgtttagttgccacgtcttggtagtcagcacacataagcaaccctgtgtggccaggttctcatgcttaatctcttctgtcatttgttagttcacacactggttatcacacattctctggctggcacctacacatagcagcgggtgagagcagagactgaagccagaacacctggtttcaaatcacgcctacatggcccaccagctaggtgagcttgagcaagtctctgcacttctcagagctcgagataaacgtctacaaaagggtaatgataaacatgtctcaaaatgctgtcactagggataaataatgtaataatttgtagatgcttattatgcttaacgtataaatgatatatatgcagttgtccctcggtacccacaagggactggttccaggacctaccacagatttgaaaatctgcaaatactgcagtccctgatataaagtggcatagtatttgcatataacttatgcacatctgcccatacactttaaatcatctctaagttacttataatacctaatgcagtacaatgtaaatgctaggtaaatcgctgttatagtgcattatttagggaatgacaagatttaaaagtttgtacatgttcggtacagaagtaattttttctaaatatttttgatctacacttagttgaatccacagaggcaaaaccctccaatatggagggctgaccaaatatgtatatatatggacttataagatgaatgtatatactttacagagaggattttctcttaagtataaggaatttatttcttctgcaagaatccagttctaaagtcttaactagtcataattactcttgaaaaatcccctgggtcactcatagagaacacaattttaataactcttgagaagtctgaactaccaattttttctccactgttaaactagatctttgtttcattgaccgagtgccagatatagtggctgcctcacaaatattagcaccagtcagaatgacaggaacctccacaggcatggagaacccgacaatgccaggcaaagcgaattcaaatcctccatctcatgctaaggcagatgtcatgttctaaaattctctgtctctgtcttcatccttcttctctcccccagggataagttttagttgagtggatatggtatagtttccataattcaaatttaaagatttaaagaagaaatgtgtttgccacaacaatggttcaaaggctgtgtgcttatgttttagtttggactcttgcttaaggatgtctcttgcatatgagaggttctgtaccagtggatctcaaagattagcatgcagccagtcacctgaaaagtctatttaaaatgcagatttcaggcctccctcacccccccagagagtagattcagtatatctggggctggccctgtggtgatggatggccactggaaaatgctaggtcagagtcatgaagttctcagcatgtatcagggcctaattcaggtccatttcgcacatctgaaaaatcaaagggaattatctgtcactaaaatttaacagcaactgccttaaatgactggagagacttccatgaaaacaattgaacacagcaaccataggaagttaaacacaataccaataaatacatttgctgatagtctttcacattgtccagtaatagtctaaactctgggtcttaattcctaatgtgaatgttctagtatttaaaagaatggtacttggaagttagaaaaggagaggagagaggagaggagaagaggaggagaggagaggagaggaaaggagaggggaggagaggagcggagaggagaggagcagagaggagaggaggggagaagaggggaggggaggtgaggggagagaggagacaaacacaactgtttttttttttcttccaactcagaaaagaccaagagcaaacactgcatttattcattccaaaggctccaacatgaaagggattcacaaaaagacagcagagctaaatgcagtatggcgtcctggatgagatacaagcacaaaagaaagacaataatggatatgctggtgaaatccaaacaaatcaaggagctttattaaacagtaatgtaccaatgttgatttcttagttttgacaaatgtaccatgggcatgtgacataacagaattctctgcattatctttgcaaatattttttcttctttcattatgtatacataatagttgtacatatttatggagtacatatgatattttgatacaagcatactatgtggaaggatcaaatcagagtaactgggatatccatcatctcatgcatttatcatagtgtctctgcatattttctataaatctaaaggtactccatatttaaatgtggtaaaaaaaatttaaaaaccttaatattcatgagcatgagagtgcaactcagatggatcgcagtttgatctgtggacctgtattatgggctggctcagccctcaccagctctgtggcctcaagttcttcatcttttaagtggaaatgatagtactccctgcctcacagaatagtcatgaagatttaatgagttagaatacaaaaagtgttcaaaactatgcttaatacctaacaaggacctgttgagtgatgcctattacccagcaagtcagcctcagtttcttcctgtgtaaaatggggacaataaaagcaccaactcaccagtgtgctgggatgatcaaatgaaatgatgtgagtaaacagcgagcacagagtctgttcatagagcactttaaatagaatttggcacagactaagcatgcaataaatggtagctataagtacaatcattaatactaataaaaactgatgggtgacctggccagttctagcttcaaagtagcaaggatctcaggtttgacttcattagctccttgcaggccactgcctggcatgcatatctaaaaagggaaggacgaatacaccatggggcctgtataacctccaccctttcttttttccaggatataagaagtatcccaatttcagggctcaggttttgactgaccaaaaacataatccaagctgacttcgaaaaggagggttgccattgacttgtgaaacacccagggaaggctgactccagggatgcaaagatgctgccaggatccatcttgctccacctcctagctgggctctcctccaggatggcttcatcctcaagatttccacagtggaaaaatacctgccaaaagctctaagaggtagatcctcagtggctcaaatccagaaggggaacctgttttccctgaatttgaatcaaagtccagagctccgtctcaatggcccagcagggatcctgtctgtctcagaccaatcacagtgttcagggagatgggatcaccgactgacttggtttgacccacgtgcccatttctggtactgacagtgaggtcaactccattcaaactaaatggactgaaaatatggaggggtgttttgccaaaagaaatttgagatattgctgccaaactaagaggtatgggaagctgtgtggctctaaaccagcgtatgttcactataatcatgtggattttgtaattgatgatcacagttggctgagcagatgtagaaactcaggaagagaagcattagccatcctgctgctggtcctctccaggtagactgcagaatccagcggccttcagagtcaggcatgcacatgtacagacctccctggctcttttgagggacacaactttgattcaattcaacatgtatttattaagcaattattacatgccaggcactgcacatgtccctgattataaatcatgtgcactttattaaaagaaacaatagagtccatggtgagcccctggaatttttagaacagttttattgaggtttcacctccataccataaaactcgcccattttaagtattaaattcaataattttaatagatttatagttgtgcagccatcaccaggattcagtttcagaacattctcatcacccaaaaactcatcatcatgcccatttcaattaatctgcattcacactcccaaatccaaccaactcctcatctctattctgcctttatagatttgccttttctggacatttcttataaatggaatcatatttttgtatgtgcttggtttctttcatttgcatttctgtttaagattcatcctataaattctttgtagcagatatcagcatttttctttttatgactgaatagtattctactgtatggctgtactgtatttatttattcatcagttgatggatgtttatatcatttacacttttggggcattatgaataatattgccatgaacatttacatacaagtctttgtgtgtatatgttttcatttctgttgggtagttatctaggagtggaatttccaggtcatatggtaaacattcgtaagtcttactgaataaaaattaaaatttttattgcctgcccaactttcccaaaaatttaaattaagccttcactccaagcaaatcatattcttggtattatatacatcaccttaataaaggttagaatctttatggaccagcctttcaacaaagttaaacaaaagtagcacagcgctgaatggcaaccaaaggtgatcacataagtagtctgatctttacttgcatcccttgaggaaaacttgtggtaaactaagttatatcccaacactttatagaatcttcttcccttttatttctaatttttctaacctcccctacaaaagatgaacactctcttcgctcacacatgcagcatctcatctgtttcctcctctttcttcttctccagtcctttattgtgtcctctatagagcttctctgacttgtccgtgtgaaaggcactgtgtgcagaaaccagggacatgcctctaggtcttcaacaccaaaacttgctttcagaaaaataattgctcaaccagtcatcccattgaaaaaatatttgtaagccagtttctttcacagcttagagggaatttagctttagtgtctttgtctataactgagtcatgataccagtgggtcagtccagatagactagattctaatgtagtaaccaacaattccgaaatctccatgggcactgcgggtgggcagggatctctgctcctatcagtcactcatggccgaggctcaaatattggtgacctgtatacctccagaactccagagggtctcccaccggtaattaaatatttatcccagaattaacacttctgcttgcagctcattggcaagagtcagtcaacagcctcactcaatcacaaggaagccaggaagaatcctactacatgcctctaagataggtcaacaggctgtgtttgagaaataggaagagtgactatctttcgtgaccatcagtttctccacaacacttgacatttgtaaaaatgtgggtgtttaaaagtggggcatttgtaagaaaagaaaaaagagttggtataatttctgcagcccattggcaggctgtggaaaatttgtatgtaattcacatattcacatagtgaaattttaaatgttttgagtaaatttcttttttaaagaagaatgttggtaaatctttttctttcttttttgagaaaaatttgcccctaactataaattctcaatttatgagcttcactaacatgggatgcatccagtcgttcacagagtcaatagatcacaaatatttagcaagcaactattacctaaggttgctcttccaactccaggaacaatttgtttgtgtcacataattggaaaatcttcagctgagggtctgatctctttctttgtggcctcctctctgccctccctcacacttgctttgtccaattgctgcttctgttgagaatcatgagcatttcccggggctcagtacctgctgcttcacacataccagaagaggcagaattgctcttagtagccctcctggaacaaaaggaggcatctttcccagagttcccaagagtcatctccacccgagttatgacacattaatacacaccacaaaaacaagtccacattcctcacactgagggacaggcctgtcctcctaaaaatgcaagaccaaaaatggagaaggaataaattcccagagaaaactcttgagtgttaggaaaaaaaggagattaagaaatggttgctctcaaggcaatcaatatgcactcacaaactcacgttatttgaggatcctaactctctactgtgatactaaaccattataatatcgtgtgcctgctgcctcataacatttatctaaaaaacacagaactctttagtatgtaaaacaagaagccaatacctgagaattaaaaaaataaagatgattatgaaagattattgttcttaaacttcaaaaatgtagaggatcatcaagattataatgatggcatgaatttttaatccgcctcatttaaatcatgtcaaatacaatgcaaggtccctgaattgtaaaattatttcacccagattgtttcaccaagatagcatgacttgacacaagccatatgtaatcactcaacctccttgcttaaagaaaaaaaattcagaaattagagtcaagccccgtctgacacaggaaacatttattttagtggtcttcagagtgctgtacataaagttgttcaaaccatggtcattagactccaatttatatttctgtttttacatttctgcctgcaaaactaattcagtctaatccatctcttgtggatgactgggaaaccttcaaaagataaatactgactatggtgaaatgtacccagaagagaaagcaattcaaattaatctcactaaatatcaccattagtgagcaatgattcatttcactcactcagaagggaggatttttttacacacctctataactgttatttgatattggggctagccccagttgacaagaattgtttcaagaaatgaaaacagcaccaagctaatggttgttttcagtgtaatcttgggtttacccagccgacttggaaagcaggtcttatcagaatcacactcgaaaatatagcattagagatcgtaaattagtatctgttgtctgagcaatgcttaaggttaaatataaaaactctcaatttatacatgtattttaggtgagatgaagggcaaagtatactttatggcaaaccagaatgtcaagtatgtggtttgaactcaaccactcatgtattaaatgataccaggtaaataacatcaatttcttcctatttaaaatattcccttagacatctactctcataacatctgactcacacaacagaaaaaatatattgtacactactgatagtgtttcctctccgccaagagaaggaacaagttgaatagacaaagcactgaggtcagggatcttttccaggtttaaaattcccccaagctccgtgcacatgatgagccctggttgatttttatccaacacccaagtttctgttgctactgcgacttctcgccaggggtcctgatttttgatgcatcagctacagcagacattgggacctatgcataagtaattttgatcactgagtcatgtgggtgaactcataagatgaatttgtgtgaacttcaggataaaatataagcacacagattgataatttattagtaggcgcttagcagatgttttcagagctgtggggatgaggtccagggtctgtgaggttttataggtgacaatctctgatcctgaggatctgagtcattttaactctctaaatctccctttctttgtggtcaaattgaagactaataatctggaataataatccataaaggaattgccatgtttgtccagcatcttccccttcttaaaggaagactacctagcctactcccatgttccagggaaatcccttgcccctcatgcccaaggccacctgcccatcacaaaaccccacctctgaccacagagacatcatgcacccaagatgagccaattggaggccttctccaagatatttaatgtagaaagaaagaaacagcaatagcttctaatgagtaccacctgctccgggtacacccctagcttctctgctggaagcaacagcaggaaacaaaactcggttcatgaaatatcaatccacagagggctcttttgccagaaatcaattttttttattattgttatactttaagttttagggtacatgtgcacaatgtgcaggttacatatgtatacatgtgccatgctggtgtgctgcacccattaactcgtcatttagcattaggtatatctcctaaagctatccctcccccctccccccaccccacaacagtccccagagtgtgatgttccccttcctgtgtccatgtgttctcattgttcaattcccacctatgagtgagaacatgtggtgtttggtttttttgttcttgcgatactttactgagaatgatgatttccaatttcatccatgtccctacaaaggacatgaactcatccttttttatggctgcatagtattccatggtgtatatgtgccacattttcttaatccagtctatcattgttggacatttgggttggttccaagtctttgctattgtgaatagtgccgcaataaacatacgtgtgcatgggtctttatagcagcatgatttatagtcctttgggtatataaccagtaatgggatggctgggtcaaatggtatttctagttctagatccctgaggaatcgccacactgactcccacaatggttgaactagtttacagtcccaccaacagtgtaaaagtgttcctatttctccacatcctctccagcacctgttgtttcctgactttttaatgattgccattctaactggtgtgagatggtatctcattgtggttttgatttgcatttctctgatggccagtgatggtgagcattttttcatgtgttttttggctgtataaatgtcttcttttgacaagtgtctgttcatgtccttcgcccactttttgatggggttttttgtttttttcttgtaaatttgtttgagttcattggagattctggatattagccctttgtcagatgagtaggttgcaaaaattttctcccattttgtaggttgcctgttcacactgctggtagtttcttttgctgtgcagaagctcttcagtttaattagatcccatttgtctattttggcttttgttgccattccttttggtgttttagacatgaagtccttgcccatgcctatgtcctgaatggtaatgcctaggttttcttctagggtttttatggttttaggtctaaggtttaagtctttaatccatcttgaattgatttttgtataaggtgaaaggaagggatccagtttcagctttccacatatggctagccagttttcccagccccatttattaaatagggaatcctttccccattgcttgtttttctcaggtttgtcaaagatcagatagttgtagatatgcagtgttatttctgaggattctgttctgttccattgatctatatctctgttttggtaccagtaccatgctgttttggtaccagtaccatgctgttttggttactgtaggcttgtagtatagtttgaagtcaggtagcatgatgcctccagctttgttcttttggcttaggactgacttggcgatgtgggcacttttttggttccatatgaactttaaagtagttttttccaattctgtgaagaaagtcattggtagcttgatggggatggcattgaatctataaattaccttggacagtatggcgattttcatgatattgattcttcccacccatgagcatggaatgttcttccatttgtttgtatcctcttttatttcattgagcagtggtttgtagttctccttgaagaggtccttcacatcccttgtaagttggattcctaggtattttattctctttgaagcaattgtgaatgggagttcactcatgatttggctctctgtctgttattggtgtataagaatgcttgtgatttttgtatattgattttgtatcctgagactttgctgtagttgcttatcagcttaaggagattttgggctgagacaatggggttttctagatatacaatcatgtcatctgcaaacagggacaatttgacttcctcttttcctaattgaataccttttatttccttctcctgcctaactgccctggccagaacttccaacactatgttgaataggagtggtgagagaggtcatccctgtcttgtgccagttttcaaagggaatgcttccagtttttgaccattcagtatgatattggctgtgggtttgtcatagatagcgcttattattttgagatacttcccatcaatacctaatttattgagagtttttagcatgaagggttattgaattttgtcaaaggccttttctgcatctgttgagataatcatgtggtttttgtctttggttctgtttatatgctggattacatttattgatttgcgtatattgatccagccttgcatcccaagaatgaagcccacttgatcatggtggataagatttttgatgtgctgctggatttggtttgccagtattttagtgaggatttttgcatcaatgttcatcaaggatattggtctaaaattctcttgtttgtgtctctgccaggctttggtatcaggatgatgctggcctcataaaatgagttggggaggattccctgtttttatattgattggaatagtttcagaaggaatggtaccagttcctccttgtacctctggtagaattcggctgtgaatccgtctggtactggactctttttggttggtaagctattcattattgccacaatttcagagcctgttactggtctattcagagaaatcaatttattttttaacagatgaataaatttaccacttttcgtctaggaggagctattgatgatgtttaccataaactattactggatgagatgctatcaagaatgtctgaatattcctactgagttttagttgaaagttggttgttttttcttcagagaagcagtttaggaatgttcatctttatctctgcagctccccataacccagctgcccaccatatacctttagcctcagtcccacaaagtgccaggaagccaagccaaacttcgtggttgtaatagcacagacctattatgacctattttacttcccttttataccagttattaatcaaagtccaagcatctccatgcatccttcattttatcccggagggtgggtgcatgctctgatatggtccaatctgcaacttccaactcctgtcctacactggaactcatggtctgtcatcagaaaaatctccctgactctccatctcttcttggaatgttctctttttcttctggctctaacaaacttgactgtaatcaaaatacaacttgtcctgcacatctcaggtgctaccaggcctgtgagtaaggcaggtatccttctagctcttcacagctccctcaaaacaatttcttccaccttcctccatgaagtaaacaccatctaagatgcaaccccctattcatccttgttaccatctcttagaaatatggcatcccccatcattcagtgaagactgtggcccagaggcctgcattttcatttctcccatcagttcccttgggaccttaaacaaccacataggctaataatctgaaatcacacataccacagtgtttcctctagctgacctcagtcttgcacttatacaattaactattaactttgcatcactcagagccataccacctcaaaacaagtaaaatcttaattccatgggtcccacttgctaaccaccaccaatctatctttccagttcagtctgtctctagtatttctatgcaacaattctccaaccctactgagacactgatatggtttggctgtgtctccactcaaatctcatcttgaattgtagtttccataatccctacatgtggtagaagagacccggtgggagataactgaatcatgggggcagtttcccccatgctatttttgtgataatgagtaagttctcacaagatctgacggttttataaagggcttccccttttgcttggctctcattcttctctctcctgccaccatgtgaagaaggacatgtttgcttccccttccaccatgactgtaagtttcatgaggcctccccagccctgtggaactgtaagccaattaaacctcttttctttgtaaatcacccagtcttgggcagttctttatagcagcctgagaaaggactaatacagacatccaatctatccaccctgctacttttttatcttacattttcatgttctcacttccattcttgtctagtttagctcccattgccccacattataatcacttgctagctgctctatctcttttgcatttgcctgagaaaaccacgagatgggtagttcactgctccatatttgggcacaagggactggccagttgagcatagccattcttttgggctcctctcctgccactctcttttcaatctctacattttaactgcttctatccctagacttctgaaagtaacccaagcctgccaacctgccccaattcagaatctatcaattttctctttcctctacctggagcagtctgcaacattcaaatgctcttacctggctcagcttctcatccttcaaatctctgctttaacattttgcccttttttcatttttagttttattgtgatgaaattaacataaaattaagcattttaaagtgaacaattcagtggtacttagtacattcacagtgttgtgcaacaaacacctctacttccaaaacattttcatcaccccaaaagaaaacccgtgctcactaagcagtccctcctcattcctacctcccaccagcccctagaaatcaatgatctgttctctgtctctgtggatctgcctattctgggatatccttcctttttgataggctttctctaagtatcctcagagaacaacctttatggttccctatcctctcctactcactggtttctcttaatagcacatattactatctaaaactatgttatttatatattagcctgtcttttcctctaagctgtgagctccataagcaaagatcttgttttatttatttttctgttctcagtgtttggaatggtggctggcatagaaagttctcaatacatatttgtcaagtgaataaagataatcttatgaggtggtatagtcttagactctacttagttttcaggtaagtaacaatactaaatttaaactaattcaggcaataataagtaaacagatgaggtgactctctctcttcatcatcatcatctcaggccattttcttcatatggatggcttcccgatgaattatgtaaacattaccagtttattttccacccttccattcacccatctatccactcatccattcatccacccacccatccatccatccatccacccatccatccacatatccatctatcaatccaaccatctaccccactcatccattcattaatccatctatccatccatcaatccaacaacttatttattgaaccacacttctacgtttaagcacttttatcagagctgtacatggagcaataactaagactatatcagataagatgtttttcccgcccactcacataaaatatgacaaagaagtgggagatatgcgagagaaaaggcttctaagtacaggaaatgacgaaaacaaatgttttgatgaaaagctgtgctaaatgtgtttaaagaacagcaaggagtcaagtgtgactgcagtaacacaaataaaagggagattagtaggacatgtggtcagagaaatggcaaagggcaaggccacatagggccatatcagccgttgcaaagacactagattttattttggtggaaataaggagctagtgaagagttttaagcagagtaacaacataatctgacttacattttaaaagtttcactccagctattatgatgagatgtaggctgcaggtaggcaaaagtataagcagcaagatctgttaggagatgatggtcagagtccaagagagagatgcaagtggcaggatgaaagcagtacatgtgtaagcagtggggttttgaattaatttttaatgtagctaatgggattagctaattttctagcatagtcaatgggattaactaacaaataggcaatgaggaaagaggtaggtaaaaatcccttggggtttaggcctaatcaatggaaagggataagttgtcatttaccgagaaggggagatgtttggggaagaagcatatttggtggagaatcaagatttctgattttgtcatgttaagtttgagatgtctaatgatgcatataaagcagttgtgtatataaatctggaactctgggaacaggttagagcatgggataaaaaatagtttaaaaataaaatgaaacaacatatattaaaaaatttgtacacgttggtcagaccttcttactattctgctcaactgtgcaatagttgccaacctgaaagaaagttctgagtctttatggtggcctccagagctcagttcctctttgacctcatctcctatactctccctccatccagccacaccatcctcctagatgtgtcttatcctggcaaacatgtttcttcctaagcctttatgcttatcttcccatgcctggcatgctctgtccccagataccatctcaccttacctcatcaacaactttaagtctttactcagacgtcaccttcttttttttttattattatactttaagttctagggtacatgtacacaatgtgcaggtttgttacatatgtatacatgtgccatgttggtgtgctgcacccgttaacccatcatttacattaggtacatctcctaatgctatccttcccccccaacccaccccatgacaggccccagtgtgtgatgtcccccaccctgtgtccatgtgttctcattgttcaattcccacctatgagtgagaacatgcagtgtttggttttctgcccttgcgatagtttgctcagaatgatggtttccagcttcatccatgtccctacaaaggacatgacctcatcctttttatggctgcatagtattccatggtgtgtatgtgccatattttcttaatccagtctatcattgatggacatttgagttggttccaagtctttgctattgtgaacagtgtcacaataaacatacgtgtgcatgtgtctttatagcagcatgatttataatcctttgagtatatacccagtaatgggatggctgggtcaaatggtatttctagttctagatccttgaggaattgccacactgtcttccacaatggttgaactagtttacagtcccaccaacagtgtaaaagcgttcctatttctccacatcctctccagcacctgttgtttcctgactttttaatgatcgccattctaactagtgtgagatggtatctcattgtggatttgatttgtatttctctgatggccagtgaggatgagcattttttcatgtgtcttttggctgcataaatgtcttcttttgagaagcatctgtttatatccttcacctactttttgatggggttgtttgattttttcttgtaaatttgtttaagttccttgtagattccggatattagccctttgtcagatgggtagactgtaaaaattttctcccattctgtaggttgcttgttcactctgatggtagtttcttttgctgtgcagaagctctttagtttaattagatcccatttgtctattttggcttttgttgccattgcttttagtgttttagtcatgaagtccttgcccatgcctatgtcctgaatggtattgcctaggttttcttctagggtttttatggttttaggtctaacatttaagtctttaatccatcttgaattaatttttgtataaggtgtaaggaagggatccagtttcagctttctacatatggctagccagtttttccagcaccatttattaaatagggaatcatttccccatttcttgtttttgtcaggtttgtcaaagatcagatggttgcagatgtgtggtattatttctgagggctctgttctattccattgctctatagctgttttggtgccagtaccatgctgttttggttactgtagccttgcactgtagtttgaagtcaggtagcatgatgcctccagcattgttatttttgcttaggattgtcttggcaatacagactattttttggttccagattaaagtagttttttccacttctgtgaagaaagtcattggtagcttgatggggatgacattgaatctataaattaccttgggcagtatggccagtttgacgatattgattcttcctacccataagcatggaatgttcttccatttgtttgtgtcctcttttattttgttgagcagtagtttgtagttctccttgaagaggtccttcacatcccttgtaagtcggattcctagaaaaggcctttgacaaaatcaagagcccttcatgctaaaaactctcaataaactagtattgatgggacgtatctcaaaataataagagctatttatgacaaacccacagccaatatcatactgaatgggcaaaaactggaagcattccctttgaaaactggcacaagacagggatgccctctctcaccacttctattcaacatattgttggaagttctggccagggcaatcaggcaagagaaagaaataaagggtattcagttaggaaaagaggaagtctaactgtccctgtttgcagatgacatgattgcatattcagaaaaccccatcgtctcagcccggaatctccttaagctgataagcaactacagcaaagtctcaggatacaaaatcaatgtgcaaaaatcacaagcattcctatacaccaagaacagacaaacagagagccaaataatgagtgaactcccaatcacaattgcttcaaagagaataaaatacctagatgtcaccttcttaacgaggtctatctagatcactctaccaaatttttaagccacccccactgcgttgcatacatctccttctttggggcgtgtataatttactattttcggtctcttaacttataaatatcctaactccatgagagtagaaacttagtttgttccattactgtattgcaagtacccaaaatagaaaaccctggatcaacatttgttcaatgaattgaatgaataaaagaaaatactgctctttgggtgtgacctagtttggcaagtatttcacttttctaaaattttaaatttctaaaatttccttctagaaaatgagacattttcaaggaggttctctcctattttcttctaggagttttatagtttcagatcttacatttaagtcattattttgagttgatttttgtatatggtgtaagataaggattcaattttattcttttgcatgtggataatccagtatttccaacaccatttgttaaaaagactgtcctttctccactgctaatcttgacactctcattgaagatcagttgatcatatgtgtatgtatttcttgcctctttatcctgttccactggtctgtatgtctgtctttatgccaggaccatggtcttctaataagaatagctttattatatatttagaagtcaatcattgtgatgtctatagctttattcttctttatcaacattgctttgtctattcttggtctttgggagttccatagaaattttatgattgtttttactacttctgaaaaactgccattgggattttgatgaggatagtatggaatctgtaggtcgctttacatagtatggattagatgtctttccatttatttgtgtctttttaattatttttaatcaattttgtgtagttttcaatgtataaatcttctacatccttgattaagcttattatggttatttgttgatattataaatggtattatctcaacttcctttttgtattgttcactgttagtgtatagaaatataattgatttttgcaggttgatttcatatcctgcaatttaattgaatttgtttattaattctaagagggtttttttgtagattatagagcttcccatacataagattatgtcacctacaaggagaattttgctggatgccttttctttcttttccttgactgactgctctggctaggatttccagtactatgttgaatataagtgttgagagtgggcatccttatcttgtgctgatattagaggaaaagctttcagttattcaccacagagtacaatattagttgtattaaacattttctatgatctctcccaattcagacctctaaatttaagatccagaagaacaatggggtgtaaaggagtttgacactgaagtcaaactgccttagttcaaacacggtttctatccattagctgtaatttttctttctgtgggtttctttacctgaaatgtgagtaaaataacaatacataacatcagccaggaaccagttaggaaaacagaagccatactaggtattacaattatggggactgaacatggggaattggtcatactcagggtccactagggcttgtggatgataattgtcaaagccctgacatacagtaaatgtattaaaaatataagttacgggtgcaaaatagttaatgacattatgccttacattgaggttttgtcatttctattgttggatgcttaaaaatgaattatttagaaagaaaaatggaataattcaattggaaattcaaatgactaataattgaaaaaaggaaaattgaggtgaaagagtggaaaacagttattcaactcactcattctttgcttccaaaagaacactagtgagaatttctacttaagagcaaagaaaaagaaaaactaattaatgctgtcagagtcagccattattttagtcccacagccccctggtgagcatacggtatttttattaccaaagttcatcactagtgcttactcaataattagataatccccactgcaatctattataataacacctaaaaagattccttattgcatctccacatatgtcaatagctttcacaaaccataaatcagtaatatattgctggcatcagagttttaagcaattaatgttaatcaatatgaaaacaaaaagactgatgtggtagggctttttctttctctatgtacaataaagaaactgcaactctttatttgaattagttcatcacctttttatgtttgtcattagctgaaatgacaattactgtcaaatcgtcatcatcatctaataattttctacaaatgtcattttgcatagcacactgtatgagactttgagcatgtctctaatattatagttcatgttcttagagagggccatgttaaattctagtagagaacaaagcctcaagggagatgttaatttgaatagttccaaaacaccttatggtatgccagtgtgggagatattgtaaagcatagtgttttaaattacaataatacatgctcttttggattaaaatatagataagattatggagaagcaccccaggcaactacctatgttcagagtgttagtcttggccctgaaatggggaaagacaatatatctgctactgaaaaagcatcttggagatggcaacgttctttgacagccctcttggaacaggctatagattgcctgctgagcatctcctcaccccttctcagttcctgataggattctcactttaaacaggtatgcacctcttttctgtgcaactcatgtgccttcggtaagatgacatcactctcagcattctgggtggactttattggtgtaaagatccccttgccagagattggcttaggacttgtcatgtgactcatatctggccaataaaacataaagtgacatctcttaagagagtcataagaagggttttctctctcctaaggaggaaccaaagggggaaaaaaagtctctttgcttctagacgttgtttctgtagatgtaaaggctgttaacttctgcagtcatcttgctgagaataaattcagaatgaagatggcaaaatggagcaagaaataagttaatgacccggaaggcctccttctgaagttgttattagagagataacatacttctttattgtttaagctggtttgagttgagggttttcttcactgcagccaaaatgccattagccaaaatctaaactggtataattttcactttattaagcagcatatcttcctgctatgttttttcctatactcattttaagacttcctattaaaggatagacttaatttattcaactgtgactattaaagccaattcaaatatcatctggtccttgaagccttcttcagatctgccaaaataactggctcctttttctgtgtttttggagcaatagtatctacatctaccctagaatgcatcgctctgtattataattatttcctgtctcccaatatcatttgattttgagtaccttaaggtaagacattgggctgggtgcagtggctcacgcctgtaatcccagcactttgggaggccgaggcgggcagatcacgaggtcaggagatcgagaccatcctggctaacacggtgaaactaaaaatacaaaaaattagccgggcacggtggcgggcgcctgtagtcccagctacatgggaggctgaggcaggagaatggcgtgaacccaggaggcggagcttgcagtgagctgaggttgcaccactgctctccagcctgggtgacagagcgagactctgtctcaaaaaaaaaataataaaaaataaaattaaagacattgtttcccactcttcttcagattatcaggaactcttgtgacacccattacttagaagattttcaataattattctagaatgaataaataaacaaatgcatgaatgaatgaacctctaatcacagatacccacaactctacacacaccctcccttgtctttgcgtttttgaatttatctagcacaatattcagctctttctaattatacctcccttctgtcatttgaaaatgggtcgctttttcctacacttatttaagtcttcctaaaacatcatgaaatgggaactgaaatgcatgtatgtcattaagtaaacattatcagacctcaaagaacccagtgaaggccaccaacgttccttgaagaattaaagctgaaatggactagctcagcgttacgaataatgcgttcctcagaagtatcttttaagatgtaaacaggtgtttttttggataagaagctctacaatcaagtaaattagaatacactgtttaaaaaatgtaaacaggttctttagtgcagaattgcttagagcttactgtatgccaatgtgctctatgaatctctgagagagatatggtatattttttcaaaatgtatttgaacatagaatcaatttttccaggtacaactattaacataccataacaattatttaaacacagtttaaaatacattttactggatccactgagctttgactgtcacaccctgctattttcctaaaaaagaattagaactaagatattatctttacaaaacttcttatgtattttatatttttatattattaggttttagtagcaaccttaagagaatcacaaaatcttggatctgagaggaaatcttaaaatccttaagattttacattgtacagtatggggagtgattattgattatgttggtattcatgaacccctccacaaatctgatgaaaatatttgcatgtcataggaggtctagaacattcatgttaatgtacttcactagctaaaaatgaatataaaaaactgaattatggcaatagtggcataattatagtatgacagtagtatagtagatccagaaaaatgcatctacacagaaaagctacaagaagttcacaaaccttttgatgaatattcatagaccccgtgtttttaatgcctttcctcctgtgatgactactgtacatattgaagaaacttaggtccaaaagtcatacagcttttaagatcaaagtcaagataagaatttgggaattctggcaacctcgctgcttgttttcagattcaatctagctgaaaacaatttttatattattatttttggactctatcaggcctctctgctcttctaaagctgctaatgcaattaattgaacctacctcagtccatcactaaagacagtgcggttggccagtgttttccaatgccttaggtggttgtcctaagattaattccctactactgtcatactataattatgccactattgccataattcagttgtttatattcatttctagctagtgaagtttctagacctcctatgacatgcaaagttcaaataaataaggattcagaagtctgactgtggtcataaattccagaatagaaaaaacatgaatgttcttagcatgcttctttgtaaataagtttgatgacccttgctgaaaaaaaaattcatgagtagaaaatattgctagtgataattaccacccaaactttattgatgtctgtgtgtatgtacatagttgatagatgatagatatagatagatagataaaagtggcatgtgtagacattaaatgctttaatgtttatgaaatgttattactatggaccatgctcatgaatactaatgaatgaaaattgcatgcttttactcaaaatagagaccataaaattaatttattaagcatttgttaagcagaacataggatagcactgttatgagctgatactccagtactatcctaaaatttcagcttgggaaaaaagtcccaagcaaatgcaactgccttcaaatagacctatacaatgttaacatttatgagttacccgagccatgtgtcaggtacccagccaaccactgtacttgcaatctttatattgaatctttacagcacctaaaaaaggtggctacttctctctctcttttaacagattaggaaatgaagattcagaaaagttcaataactgtctcatgctcatatggttagtaagggtgagagcctgggtttgaacccttgactttttggttcatcatcctaagttcctaaccattatacatcttgccccttggtaaccactggcagttctgcaactgctagggccaaatgcaagctcctgattcatatttttatttcccctacatttgttaacataatcagtcacttttgttgaaaggtattcttttcaaaagccagctattactgagtttttctacttcattcaaactcttcatccaatattcatcatcctggttttcttcagtcatcaattccttcacctatgcatgcatatattatgaaggacactatgcaaagcaaagttgaatgaaatatggtctctgccctcaagaaacttggaattcagaggaggaagaaacaattaaaccaattagtacagcacaacttaaaatgtcagcacgtgggttacaagatcatggaagagacttacccaaattgccctggtgtgtaggatggaattcctgaaggaactgttgcctgagctgagttttgaagaacggtgggaattggctgaataaagaagagttggggctgggagtaggcattgtggacctagggaacaatatacatgaggcctaacctaaaaggacgaattctacaaattgtaactagttcagagcaaatgaattctggagcatgggtgccctgtatctgtgtgcttttatgcatgtgtaagctatggcttagcctttacaaagccttagcatgctgcccagaagttcactctgggtctaggtcccagcttctctctctctcctctctctctctctctctctcaatatgttgtgagtgtgtgtgtgtgtgtgtggtgtgtgtgttttgagtatatgtctgtcgcaaatgtatgtgcatgtgttgcatatgtgcagaacctgtgaaaaactcctttcatgtccttgtttcttgcagagaactctacatcatcctacacatgtcttcttgctccttcctccttacgaggaaggtcctgagaaacttccttcatgatcctccacaccctttgccatcactgtatcccattctcccttcttaagagaagcagatgggatgaacagactatgattattaccaaaataaattatactagcaactgtcagtcccttcctgggcagtatatctgcagcaaagaaaaagatatcactagtgtccctgttcaatatccctttgttcataaattttgctttctccatttttaatttctactaacagagaaactggctcctcaatatctccaatgagacatgagattcaagattagatgtcactatatgcctcaaaagtatacaagcaggtagaatactccacccaatcccaatcccttgggcccatcagtcttggccaatctccagggtcttggctatggactttgtgttcattcccatggacaagccagtcacccaacccctgtgagcagaactgcacagaccactgaagaaggtcaccatgagaagagctctgtaatgtctgtatgtaacttatgtagggagtaatctgaatgtggcactctgtaattttctctgtctccttggaatctaccatttctctctgtagttctttcaaggtacagtctgatgcaaagagaagagccatccctgatttgagcaaatcctaagactaaccccatgaactctgttcctcttcttacacacttagccttttgaaagtgaagccttctatgagacagagaagcccaggatacatcttcctgcttgaatgattttttaaaaggcagaaaaatgggtaggggagacacaaggaataaaaactctccttcaatcacatatgcctatgtagattattctggttatgagatcacacttttcacgaaaatctcagaggacttggtgtcctctaaaaggttaagaacccctgattgagagagatctttagcaatggaaataaaaattctgcttcttcagaataaagtggatgtgcatatgtcatctcccctcagataagtctgatgctaattgctcattcaggtatgaatcctttccatctgacaccactgctgcttcctgatgtacctgcaacttttgtgattttactacccatgcaaacagtcatttgctgcctccaacaaaagacacgagctatttattgctttactttacagatgctgctggagatcacatttaacaatacaaataccacagaattgtctttggctgtcacaagctgccaaagtgtagctcaaaccagagcctgataatgtactttgcaaaactctatgctagtgattttacacacattccaggcttaattagacagggctaaaatggaacctagcttttagcagttacactcttttgtcggtatctaaacagtaatgcttatctcttggtttgtgacttgtctcacaagtatatataattgcagtatttcattactggaaacaaacttcaacatctactacagcatacaaaaatgcagtgagcaattctatttgggctgaagatgtactacaaaataaatggaatctagtcttacctaaatattcatctttcattttggaggaacacacacactcacatgcacacaccacttctactgcttgctttgttctgagttaactgtagacatagctaaaaccttccaggtttgcatggagctgtctaccagatgggaaggtgaaggtagggatggcagttacactaggacaacattacctgaaaaatcctggcaagccccttcacccctccatgcctcagttttcccagctttaaaattgtgtaacaacaatttcagagagttgttacatgagttaatcagtgtagggtcttcaaaccagaacatgccactagatgttcattagtagtactgttattatctcacaagtgagcataagaatatcaccttgaacatgagagggcttctctgaagtcagacgggttagtgcacatgcagcatttagaagtatttccacacgtgtgaaaacggtgcaactgctaactgttgctatttcatctcctggaggcattattgtaaagacagtgttcaaaatgcacctgttgtattcagtgaacctccactatcgattttgtggacttatgtgcattttgggcctttttgttacaaggccaaatattgtgcagggtgaagaggccaaggatggaaattaggacaaaggaaaagggagaagagaaagaaaaagaaatcgatacaagaggcacttactgaactattttgtgactgattagcaaggatagcttcttctgcgttctgttttcttccttcagggaattttccatcattttaggctggtttaaactgtgtccaatcactataaccaagctttataaagagataggagattctctttttattatttttggccagtgatgttccagcttaaactaattaccaggaggcccaaggtgctcattcactcactgttatatgaaactgtaacacttttgctttcaattgggaaaaaatttaaaatgtctggatttgaaaaagaaatgcttctagctggtacccatctatacctgtagtcataatgatgatggcaataacagcaatgcaatccaggcatcacttggggtcccacatctctcaagatctgagcagggttgctcccaatcccaatgtcacagcctaacggagccttcgggagtcctagtctcatccacatgactgctaatgcccatgtgattctgctctcagcctcccactctaaaccttatatgtacaacctttggtgaacccggaagttccatgaagcatatggctccacctagggctttgaccttcctctcctctttccatctcttattttcctctctcactctcaagagctagcattttctctcatctcatgctaggagatattactcccttcttgacagatttggtgtcagccaaaatccacgttctggcaatagatgcaactaagagaacaaaagtatccttaatgtattacattctttacgttattattattaagattttcaagtttttgtctaaccatcttatttaaagcttccattttatggtttaatgataccattaactaggtgtaatcactattatcatcctcactaatcttgataccagtaattctcaactgggggcaatttttcccctcccctacccctcttgcaacatttggcaatgtctggagacatttttggtggtcacagattgggggcgggagatgctttaaggggtagaggccaggaatgccgctaaacatcctacaatgcataggatggtctcccagctccaaaagtcaatagtgccaaggctgagtaaccttgctttatgcctattgtgaaactcagccttaggttagccaagtcatccaaggatacaagtatgaaagggcagaggtgaggttctactggttccaatggctttccaaatccaggctctcatctatgacataagctacctgtcttagttatatatcactaagcagcaatattaccagaaacctacaagcttaaaacaacatcctgtgcacagcttaccaaggtactcagagtctcacaaggctgtaattcaggtgtcaactggggctgtggtcccatctaaggctgggataggggaagattagcttccacgattaattagtttgttatcagaatttattttcttgccactataggaccaaagtccacagttgctgctgccccagctccttgaggctttccacgattccttgccacaaggggctccccaacatgaccacttgcctccccaaagctagtaagggacagactccagtatgatgtcatgtaatcatgtacattcccaacatctttgctgcattctacatgtaagaagcaagtcacaatcccccctacacttaatagaaggagatcacacaagctcatgaacaccaggaggtggggatggaaccatcataaaaacctttccactgcactgttaatggtatcactaccttgaagatagtttccttccagtgtagcaatttcaagaactgtatcctcacaaatgtgtatgtatccatccatttttacagacctcgacgaatatgtacagaaagcctactgtaagcgtgaagaccctgtgctgagggaggtgagcattcctgatactgacttaaggtaaatgctgcaaacatagttctggaagtcagcttgatgaggccgttggaccactgcacggaatccataccccctgctatagtgtgaagatgatgatcaacagagccctttaaaaaacaaaagaatgcagaccgtctcatgaaagaaaaacaaatttggtaccttgtttaactttgaatggcacacaactgattccttcctctaaccccttcttctgtctgttcttgtcctgttcttccccgtagttacctttatttatccttccattctatttattacttttcccacccaagcccttgctggacactcatgagggctttcaggcatagagaggtcagaaaattcagaatgaaaatgctacaattattccaataattgtcacatatattaattggagcttttgggtgcaaacaacagaaatgaattctgacaaagttaaacaaatagggaacaaaggaaaaggtatgtgatggctcaaatagttgaagaagccagtgttagaaagagtagaaacctgagaaacccacagcttcaggtaggagttgattgactgctttctaatggctgtgaacacagtgcctgatacgtattttttcaaccttgcctcccctttccttcccttcctttagaattcctagtgtcttttttttttttttttaagatgggttttgccatgttgtccaggctggtctcaaactcctgagcttaagcaatccatccacctcggcctcccaaactgctgggattacaggcataatccaccgtgcccgacctccagtgtctatttttcccacctctgtgcctaggtatatcgattgttttgctcccacttactagtgaaaatatgtgggttttgcttttctgtttctgcattgaagcatataagaaaatagcatctagctgcatccgtgttgctgcaaaggacgttatttcattcttgtttatggctgtgttgtattctgtggtgtatatgtgcattttctttatccaatccactgatgagcatctaggtcgattccatgtttttgctattgtgaacagtgctgtgataaacatactactgcaggtgtctttttgttagaacaatttattttcttttgggtatatacccaataacgggactgttgggttgaatggtaattctatttttagttctttaagaaatcctcaaaccacttttttttttttacaagggctgaactaatttaaatttccaccaacagtgttcaagtgttcctttttcttgacctcgccaacatctgttgttttttcacgttttaatagtagccattttgaaaggacaccctattcaataaatagtactggggaaactgattaaccaaatgcagaggaatgaaactggatccagttcaactctttcttggggctaagagcagtggtttgggtactcatgccagagacatggttctgaggttctgctcaactgcttaaagggtgcgtgaccttgtgtaattcattaagtcactcggtgtcctaatctgcaacatggggatggaaataacctcccatattcatagagctgttgagagaattaaataagtagcctgatacgttgtaagtattcaacattcaatatatgttagaaatgtctctttcttttctcttttaccggatgtttaccttcaattcgtgtactagttttggttttggctttcatattctcacacagatttttcaaagcacccaagggtagcttcaagagtatgtgacccacaagtcattcggggctccatgctcagaagcacccctcgtttggtttaatgccctgctattactatcttgaaattctgaatttttttaaggggcttcacattttcagttttgcttttcattattttacacagctatattaggtcgtcctttcattactataaagagatgcctaaaactgggtaattgataaggtaaagaagtttaatgggctcgctgttctgcaggctgtgcaggatgcatggtgcttctggtgaggcctcaggaagcttacaattatggcggaaggtggcagggagcaggcacgtcacatggcaagtgggagcaggagaaagcgagtggggaggtgccacactcttttaacaattagatctcacttgaactcagtaccactcattactgtgggtagggcaggaagccattcatgaagagtccacacccgatgacccaaacacctcccaccacgccccacctccaacactggggattacatttcaacatgagatttggaggggcaaacactaaagccatatcaaaacctatgctctggtcgggtgcggtggctcatgcttgtaatcccagcactctgggaggccaaggagccggatcacttgaggtcaggagatggagaccagtctagtcaacacggtgaaaccctgtctctactaaaaatacaaaaattagccgggtgtcgtggtgggcgcctgtgacccaagctactcaggaggctgaggcacgagaattgcttgaactcgggaggtgggggttgggtgtagtgagccgaggtcgcaccactgcactctccagcctccagcctgggcgacagagcaagaattcatctcaaaaaaaaaaaaaaaaaaaaaaaaaaaaaaaaaaaaagctatgctctcaacagttgtcaatcaatccccaaggtgcagctatttcctaacacttgtagcattgtgattgacaggatacatttttggagagtggagacatcccaggactgaagacacaagcctcctgtccagctctaagcaatgcagcaatgcaaggacagcgtacagtacaagtttggaaaagtttctctttttctggaactgcgggcagagaagggatctcagatcaacctcaggtcagcagcatagttacagcaaacctccatttcactttgtttagagaggttacagataaagtacgttttcgttgttttatattgtattgtttcgttttgttacccaatttagatcttgcttttttattaatgctgcttgatcacaacctgtggtaattaaccaaccctttggatggggcttaattttaattaaacaatgctccaattcttaataggctaaatgtttgttacttctccaactcttatcacaaggtaattttgtagtacttcatagattttctgagaaattgctttatcaatttttccctgcagctgtacactgaatctgacttgtattgctagctgttgctttaaattaattttctaatttttccagttctttctatttggctagttagtccttacattaaatttcttcaccttctgattaacaattaacagtacttatggctgttctatggctataaaattggccttgctgggttccacatttatcttgctttaatgatcaaatttgtttggtgtaagattttttttcctcgacatcagctttctatattctgggatctacaactcaagctgtgtccctttagcctcttacatcatcaccagcaataaagattttactgtcaggacttggctgacaaatttgcaggctctttattactggtgatgatggactataagaagcagaaaaaacacagcttgaatctcattcccagcttgaatttgcaaggctggcatttagaaaaattatgttgtgatttcacaaaccaagaaaatttgaagacgcaagtcagagaattaataaaaaactttcccccatcttcttctgaaatggctttggtgaagtcattgcacagtgtggatttggtcaagtctccaccaacaaaattgaatgtttacataattcacgtgacttcctcttacttcaagtacctgtgtaacttcagctagaggcacttgaaggactgaactaccttgctctagggcaagacattttcctgttgtgttctaagggtacaccagaaaaatcatgcgtcaatggaaacctaagcattgtgtagcccagagaattatctattctatgggagctattttacaactctgtaaatgacagataactaatagcaaagcaaaataattcttgtctatagacatccaaattctgccctgttcagcagttcaattgacttccttctgccactgtggaaggagctgattttgcctccatttgcacatttgtttcaacattcctttatttcatatttctcctttgcaccagttataagatccacttggtttcctcgttgattgagttaaaatatctaacacatgttcattttatctgagtcataatttacttttcttaaaattatattttaacaatatctaatcgctgtacataaactataaaattatcgtttgataaagtaataaggtaaagtactgctaggaagtagttgaagcccacgtttgagaatcactacacgtggtttctaatgccagatttgttctttgctatctcggcaaatttaaatgcttctaatttcattacctcatatataaaatgtaggtaataatacctgctttgtgggtgaatgaaataatacaaattactacatactttgattagtcagtatttgttattatgttcataatattaattatccttattgatgcattatttaaacataatcaaaatgaacttgttaattgcttaagaattccaattgaaatattgttactgtactcttgagcttctaatatagtgcatcccaacccttcaaaaaggagtgattttgtttcataagtgtcttaagacttacaaactttctgagccattttaattatttacctgcatagtgtgtatatatatatacaaatatacacacacacacgtagtgtgtatatatttcatatatacacacacacgcatagtgtgtatatatttcatatatacacacacacgcgtagtgtgtatatatttcatatatatatatatatatatatatatatatatatatatatatatataaaattccagatcagaccaagtttctgcccttctgtttctgagaaagtaacaagaatctaaatgcatattgtcggcaaactcagctgtgactaggatcctggcaggagaggaaagcacaaaggaagcctgctccagtgacactgattcagctcctgcctgaagcaccgctttctggctgtgtggccaaagccacatgaaaaaagaaaagggaggtcccaaaacctcacccacagtgtggacactgctgtatttcagcaatatggattgagagcctcagggtcattcatgtatcctttgaagctggcattacacttttgggaaaagatcctgaaaaaaaaaatcagagatatatatagagacttaggtacaaaggtatttaccacaggacaatttctgacagtgaaaaattagagataaccttaataccctaaacaaataaacaaagatccttcctccttatgatggaatattagttagctatcataagccaggtttttcaaaactgttaataaaattctcaaaatgttaaatgtaaaaaacaaacataaacataaaattacatagtctatgcctcctattttgtaacagttctcacacacacacacacacacacacacacacacaccccagtagcaaacacacaccaatatgttcataatgcacagaatgaaaagctagaggaaacaggccaaaatattcacaattattaagtaattatttctgggtactaagattgtggagatagttccatttttccttaggttattatgaatggtccaaactttaaacagtgagcatgtgttactattacagttaataaaaaaaaaaagttatttaaaaaacaagaacctgcaggccatattaataactgtatttaaagcctatggaagttaccactggtagctgaggacatcatgcagaaagaacaggagaaggagaatggttgttgccttcaccacgaaagccccaatgtgctacctctaccagccacattgtcaataacagttggctttttttttttttttttttttttttttttttttttttttgccagggaccaatttcgggcagaagacttaaattaggtaaatatagattctgttacactctattgttttgtttgcatagccagcagtctacgttgtttctagaggactctagaggaccttaatgtgtttctacctcaaggtgacctctgaagagttaccctttagtagaaagaagtacaatggtcaccaaaaatggtcattccacaaccatcaaaacaatattagacaactttggattcatattttagtcttattcctggtttcggacaactctgatgttaacagcttttagaagttttagatgtttgctttattttctttcataccattaccaataattcattatcagataactaaaatttgcacattttaagggattaacacagtaaatttaaaattttcattaagctgccccactgctaaaatgtacaacttgattatatacaaaataatttcaattaagaaggtaatacatttttgctgtggtaacagaaagcatttggaaataaattacctatgtttatcactagcagcaagttaagctattatgtattcagaaacgaacaaaaataaagcttattttatatatacatatatatacacacacacatatatccttttagaaagttattttatgtatgcaaatgaaaatacccctgtggttgacaactgtaattaaggtttctctctagctttcagaaaaatagtgtttccctctcttcccgcaaagtagttcatccaattggtacacctaattgaacctgaaatttcatacgttccacaagatcatgttaatctcatcattttcttcatctcttagcttggttaaaggcaaagagttattgagagaagctgtgattggcatgtcttctgctgatcaattgcaatttcctctccttgtaaactctatttagtgttacaaaaacaattcaaaggcagagattgtaggtgccaggcttttcctctgacctttaaatcaaatttagaatttcacagggtagtatgccttcaagcaaaatctgtcggcttaataaagtggaaattttctgcaataaatctgcaataaatttctaccattcacaaagaaaggtaagctttacttattgctgaatagttctgaacaagggcgcaagcttcttgggtgagataaaaacaagtgctgttaaacgtaagaacaactcaaaataatgaaagaaaaagggtgagtgtcataaatataatgagaaaacaaaagaaacacagagaagaaaaacaggatagaggaaaaaatatgacagaattacgaagaggcaagaccaagacatgaacaaaggggaaacaaagaagggacacaaggaaaaatagatgattaatttttgtctcattttgccaataagtacaagatcattacaatcataagatctcctgtgtaggatacataaaatcactgttttgggggtggtgaaccacaactgtactctaatccctgctgagtctccatatgtgtttgttatagcaccaaatgatctaatggcttattctattttccaaacaagtaaatgccaagtatttgctaaggaaactaaggtcaaatatatacatttcttttctctattttctaaaggaaatcctactaattcccactggcagaggaccacatacatataagagaccaatagatatacccattcgcaaagaagctggtaacaaatcgacaaacaaattaaaaaacccaaaacatcagagataaactgtcacacaattaaagtaaaatactctccaatgcaagacctcttcctagacgaagattgtttcgcttcccgatatttttaaaacattgaattagctgccaatacacaaaaacagagaaactcatagttttaaaaatccagatttctcagctcctcaaaaaatcagaaactctagcagcattcctatgtattgattattaactggagcataagctgctattgccacagacccccacattacccactgccgtccttgcacccactcatttggattatttgcttgagcactgctgttggtgaaatttataactcttactattaagatgattcagctcagtattagtttcctaatgctgctataacaaataccgcaaacatagtgccatctaactatacagatttatcatcttacagttctgaaggtcagaagttcaaaacggatcttacagggctaaaatcacagtgttggcagaacagtgtgatttctagagggtctcaggtaaaatccgtttccttgccttttctggcttatggaggccacctgcattctctgcatgctcatgtccccctcctcaatcttcaaaatcagctgtgtagcatcttccatgtctctttccctctgacattcccgccttcgtcttataaagacccttgtgattacacacccggatactacaggatcatcaatccttcttgtgctctttaacttcatctgcaaaggctttttcaccaccacatatgcacaggttccagaaattagaacctggacatctttgaggggccatttatcagcgtgccacaggctccatcctcaaaagagcaaagaaccttcaagccataacaggttgaagatactggctcacacattcaggaaaaccaagacaaataacaaggcaaacattgtaaaggcatatctcagacatagaagcataaagaggttagaacacaggtttttcttgatgcttcctccattttactataccagttctctcttaaaatgtatttcaacacaatgttttcttcaaattgcagcattcttcacattgagaacaagttttcacaccaagtcatttgcctatcagtggaagatgcatgaaaccatctttgttacctctaccctcttctaccttctacgtttctactgattacaattaattagcccctttttggacaccaatgttgtcctaggcattatgcaaagtgctgtccaactttacagggctcatttcttctaatcttcacagcaggagatttatcttacagatgatatttaagccccaaaacagctcattgacttgtccaaacccatacagttattaaatacagtatggcttgaccttggaagtcagatcctcttggtcaccaacttataacaactgatttatgacactattttatgacacttctggtcaactatccccatattcttatttgaaaatgtttgtactagatggagaagttcaaggaaattttaaaaagtggatttgaatgttttaaactgttcaccaaaaatagtaaataatcagatcaatttcctcttaactatgttttgaataagcttatagtgctgctttggagaaagcaaacagcctgaaaacaccttgagctttggagaaagaggggagaaatatattttacttaagacaggactttaaatcaaatacatatgaggttatgaaggaaaatgaattaaataacgtgacagtgagatgtttatagtgctgtctggtggccagtgaaaggtgactccttgatatgcttctgcccatctgttttcattttccttggccatattctttccatgaccttgagatagccatgtagccttctgtcttggcgtttttggttagacatctatcaaataaaaattattatttcagcccctgttttctttagatgggtagagaataactcaaaaatgaaactctagacctgaaaaatcatttaagaaataattctcaaatttgcctcttctctccacctacaccactacctctgtaatcaagctaatcatctctcacttactgtgtgccttagcttcctgactggtcttggtgattccattcttgtccccagcacacttgatcttcatattgtcactggcgcaaccttaatataattactgaactcttccatttaacacacctcaatggcttcccagttgctgtctgaataagagttagatggcataacataactcacatgtttatctggctcccaactaaacactttgaccccatcttctccaagtttaactaacccctttgatttcctctctttcaagtttaactaatccctttgacctcatttcctccaaagtttcccataggtatatgcctttgtcaaacatgctcttgactacattactcctacctctcttactaactgcttctcattcttgcaggctttgattctcatacatgaggcttataaagaagtcctaatacagaaatatcatcataggctttctaggtttctaatatttaactttccactgtacttagcaaatagacacttagttgtttccatttatccaacctcaaatcctgggccattaacacatttatgtaaatgaaaagaccccaactcttactgcaaacacttaggggagattattaaaaacaaacagggatattggcctgtagttttcttttcttgcaatgtctttgactagatttgatatcaagatagggctggcctcatacaattagtttggaagtattctttcttcaagtttttggaagaatttaagggggcttggtgtaaattatttaaatggtagaatttagctatggagctatctagtcctgggcatctcttggttgggagatttttaattacttattcaatattcttattcatgattggtccattccaattttgtttcttcatgatttagtcttggtaggttgtacatttcagaaaaatgtattcgtttcttctgggttatccaatttgttggcacataatggtgcatattagtctcttataatcctttatatttctacagcatcagttgcaatgtctcctctttcatatatgattttatttgttttagtcttttctcttttttcttaatctagctaaaggtttgaatattttgtttatcttttcaaaaaaaagaatgtgttgtttaattgttacatatttgtgaattttccattttcccttctgtttttaatttccagtttctttctattgtgattagcaaagatacttggtataatttcaattttcttaaatttgttgggatttgtttaagcccagacatatgatcaatcctgctgtgtgtgcttgagaagaatgtacattccatgctgggtggaatgttctgcatatttctgttaggtccatttggtgtatagctttgctcaagtttgctgtttccttgttaatttttggtctggataatctatccattatggaaagtggtgattaaagtattctactattattgtgtttctatttctctcttcagctttgtcaatgtttgctgatatatatttagatttatatatgcagttcttatatatatatatgatttatatatacagctctgatgttagatgcatatatatttataattattacatcttcctgattaattgaccttttcctttatcattatgtattgaacttctttttctcctgttacagtttttgatttagagtctatattgtctatgtacagacatccctgctctcttttgggttaccacttgcatggaatatcattgttttattccttcactttcagcccatgtatgtttttaaatctaaagtgagtctcttataaacagcatagtttgacttaatctttttattcattcaaccactctatgtcttttcattgggaaatctaatccatttatattttgttttgtttttagagactatagaaacattttagatttacagaaagattgggcaaaaagtagagttttcatataccctccaaatagttttgcttattattaacatcctgcattagttcagtgcatttgttaaaattgttgaatcaacagtgtacattatccttaactaaaatttatagtttacattaaggtttatttgtggtatacatttctatgggttttgacaaatgtatatcataaactgcattcatgtttaaagtatattcctcaaatttttcgttattttattttttatttttaattgatttataacaactgtacatttatgaggtatatgtaatattttgatacatgtatacaatgtgtaattatcaaattaaggtaattggtatatccatcacctcaaatatttatcatttctgtgttaagaacattcaaaatttttttctagctattttgtaatatacaataaattattgttaacaatagtcaccctactgtgctatagaatactagaacatattcctcttaacaatgatactgttaaccaaccttttcccatctgcccttcctccatactcttcccagcctctggtaaccattattctactctctacttctatgagatcaactttttcatcgataggtaagaattactatcgtcatttcactcattgttttccatctgtcctgtagttcttttgtctatatttgcctctcttgttgtcttctcctttgtgatttgttgactttttgtattaatataccttgattccttctctttttcttttgtgtagattttatacgtattttctttgtggttaccatgagacttacataaaatatcttacagttagaaagtctactttaagccagtaacaacttaacttcaatcatatacaaaaactctgcacttttacttcctccctccaacactttatgttattgatatcataatctttattgttttacattgtgtatccactaacaaatttttgtagttacagttaatacttttattttttatttttatactagaattaaaagtgatttatataccaccattgcagtattctgtgcatatatactaaactttaccaatgagttttactttcatatgctttcgtgttgctatttagcaatctttttttcaacttaaagaatgtcctggccggacatggtggctcacgcctgtaatcccagcactttgggaagctgaggcaggcagatcatgaggtcaggagatcgagaccatcctggctaacatggtgaaaccctgtctctactaaaaatacaagaaattagccaggcgtggtggcaggcacttgtggtcccagctattagggaggctgaggcaggagaatggcttgaacccggggggcggagcttgcagtgagccaagatcgtgccactgcactccaccctgggcgacagagcgagactccgtctcaaaggggaaaaaaaaaaaaaaaaaaaaggaattgcctgtaacatttctcttaagtccaggggcaatgaactctctaagctcttgtttgttttggaaagtctttatctccccttcttttttgaagaagagattactgggtatagtttttagtggttggcagtttttgtctttcatgattttaaatatattatccaacttccttttgccttgaaaaatgtctctgaaaaatctgttgatagcctaggaaaccagaggtcaatatcccttgtgaacatagatgcaaaaatccacaacagaatactggcaaacaaaattcaatagaacattaaacagatcatatattatgaccaagtgtcatttatcctcgggatgccaggatggttcaacgtgctcaagtcaataatgtgatataccacattaacagaatgaagggcaaaaatcacataatcgtttcaagagatgcacaaaaagaatttgaaaaaattcaacatcctttcatgataaaaactctcaacaaactacatacagaaggaatttaccccaacattaaaggccataaatagaaagcctgcagctaatttcatattcaacagtgaaaaactgaaatctttccctctaagatcaagaacaaggcaaggattcccacactcaccatttctatttaacatagtactgaaagtgctagccagagcaattagacaagaaaaagaaataaaaattacctaaatcctgatggaaggagtaaaattctctgtttgcagattacatagtcttatacctagaaaaccctaaagacaacacaaaaatactcttagaataaccgaattaaataaaatttcataatacaaaatcaacatacgaaaatcaatttcatgtctatatactaacaataaacaatccaaaataattacaagaacaattctattcacaatagtaacaaaataaatacttagagataaatttaaactgggagattaaagagttattaactggaaactacacaacattgatgaaagaaattaaagaagacaaaaagaaatggaaagccatctcatgttcatggattggaagatttaatattattaaaatgtctaaaaaatcactcttatctattaaaatgtctaaaaaacccaatctttatcaaaatgctggtgtcatttgtttacagaaatagaaaaaaactcctaaaatccataagatgccacaaaaatactcaaaagcaatactgagaaagaacaaggttagagacatcacacttcctggttttaaaatacattacaaagctacagtaaccaaaacagtatggtactgacaaaaacaattgtatacaccaatagaacagaacagaaagcccaaaaataaatgcagacatacagaaactgatctttgaccaggtgccaagaatacacagggaaaggatagtctcatcaacaaatgatgtcagaaatactgaatatccagaagtaaaagaatgaaattgcacccttttcatatactatacacaaaagtaaactcaaaatggattaaagacttaaaggacctgacatgataaaactcctagaagaaaacgtaagacaaaagcaaaatttttctagtcaatgacttcttggatatgacaccaaaggcacaagcaacaaaagcaaaaatagactagtgggactacatcaaactaaagagcttctgcacagcaaataaaaaaatcaacagagtgaaaaaggtaatttataaaatggaaagaaatatttacaaccatatataaaataaggggttaatattccacaaatgtaatgaatgactacaattctatagccaaaaaaaaaaaactgattttttaaatggccaaaggatttgaaaagccatttcttcaaataagttgcacaaatggccaaaaggataagaacagattctcagcatcatgaatcattaaggaaatacaaatcaaaaacgcaacgagatattatttcacacccattaggatggctattatcattttttaaaagatagtaagtgctggtgggatttggaaaaattggaacctttgtgcactgttagcaggaatataaaatggtatagcactatagaaacagtaataatgttctttaaaaatttttaaatagagctaccatacgatccagcaatcctacttcctggtatatatctaaaagattgaaataaggatcctgaagagttattagaatgcccatattcactgtagtgttattcacaatattcacaaccaagatatggaaacaaacgttcatcaataaatgaatatacataaatgtggcatatacatacaatggaatattatttcactttataaaaaggaaatccattatatttgacatgtatgaagctggaggacattatgctgagtgaaataacctaatcacagaagttcaaatacatgagattttaactatataaggtatctaaaataggtgaattcatagaaacagagtgtagatgctggttaccaagggctggaggtggggaggaatgtggagttgctgatcaatgagataaaatttcagttgtgcaagatgcataagttctagatacctgctgtacaacattgtccctatagttaacaatagtgtgttatgcacataaaacttaaatcagagggtaatctcatgttacgtgttcttatcactattaaaaattaattaaaggctctttccccaaagattctgacccaatttgtctagggtggttgtacagatatttaagtttccaggtaaagttattgtgaactaatgttgagaagcaccagtctataaggatgagtcgagaataaactcaataattacacaaacttttctatcaaagatgtcatcaggctaaattatttaataaggtaaattttcagcaagcaaggggtatatattttagctgtccagggtacagagttacaatcaggtgtacacttaattgtataccttgtcttataagatgaacttagaatagatgaggtggtgcaatagaccaaaatgtaatcatccaatacctcaggacacacatttaaaaatgcacaaacagtataattacaacacatatgattagtaaggttgatggaagagttctgcttaaaggtagcagaatatgtgggtgaatgaagaattaagcatatatgactattacctatgccccaggaagacggtagtgagacctccttgcactgcaggatctactaaaaggttctacatctcatttttttcccataaaaagagttctaatctgttttaaataacactttttgtgaaaatgccaatttatgattttatatttaaaactatagttttgaagacaactattagaaaacaaaaaaataaatctggaaaaaaattatattgatacaatgtgaatattttagttaattttcttatctgtgtaaatgcatggtttatgaacttaaattaacacaatacataaaggtttatgccctttttaaaactaaatttaaattgtatcatgggcatttctaatatatttttgagaaacagttctgttgtgtatacatatagtacctgttatataaatttacatgttttatttaactatgtctaccttgtacatttagattgatcttaatttttcacttttataaagatataaaaatataataatatgtgtgtgtggggggttatttattgttaaagagaacaactgggtttaggacaactagcaattccatacagtggtatctataaacctcaccattgtgttcttgatacacctacgaattacagatttacctgccactccaccccaagtgtctggattcattaggtctcagacagtatgcattttttagtaagctccaaaagcagttcttatgcagacagatggttcatagcttctacttgtgaaactggtatcagcctttttaaaattctcacacatactggcaaacagtccatcagaaagataacaactttttatttccttaagcaatgtatgatcgtgccaattaaggtaaacttttagaaatcctgtgctaatttgataagcaataagtacatgttgctttttgagatgcaactttttgattgctagtgaagatgaaggcctatatatattctccagtcataatgtatattattctgtaaatttctatttcttttcatatcctttgcccattttttccattaaggtatcattttcttcaatggcttttaagaattctttttattttaaaattactccctggctgaaaatatatttcctggtttattgtttgaatttgaattttatggtgtttatttcttgtcctacagaagttctgggtcttgacaaaggcacacagtataccttttgctaagcagccatcaaatcttctttctgccttttttatgtcatcctttcaagtctttctatgctgccgctcttgtttttgttgttttattttttacttgtaactctttaagccatctgaaacttatgttaatacattttctttcttttttttttcttcgagacagttttgctttgtcgcccagactggagtgcagtggcgtgatgttggctcactgcaacctctgcctcccaggttccagcaattctcctgcctcagcctcctgagtagctgggattacagcggccccgccacgacgcccagcctttttttttttttttttttttttgtatttttagtagagatggggtttcactttctctaagaaaattaactcatttttcttgggcatggtggctcatacctgtaatacaagcactttgggaggctgaggtgggtagatcacttgaggtcaggagttcatgaccagcctggccaacatggtgaaactgcatctctactaaaaatacaaaaattacccaggtgtggtggtgcatgtctgtaattccagataggaggctgagacacaagaatcacatgaacccgagagaccaaggctgcagtgagctgagattgcaccactgcactccagcctgagtgacagagcaagaccctgtccccccaccaaaaaaaaaaaagaaaactcattttttcagaggttgtttttaataatttttttattatttcttgctgttatatggcacaactttctctaactaatatgtcaagttgtttctaatatgagaccaggaggaagtgtgtcacagtcagaggtaacagatgctaattatcttatcacacttcccacgattagcacaagttggaaataaagtctcacctgatgtggtttcatgtccctttaacgtgcattaaaatatattgttattttaaaaacaataacacatttttttagaaaaaaacaatgcctccttcccaaatgaatttttagaggttgccacttgaaactcatttatacaaccttccaacagtaacaaaatgtcacatgctcatgctgcaactgttactaggttatttcacgatttttattaatataacaagattcactggtgtctacaggatgtaaatgtaaatgtgattaatatatgattaatatacagcagggaaatattttgaactaataagtgttgcctttccccttctctctatatacatacatataaatttctctctctatatatatatatattcctatatacttttttctatatatacatatataatatatatatatagagagagagtaaagagacagagagagacatatacacgtgtatgtatacatgcataagtaggtgttttaacctagagaccactgcccccattaaaactggacccattctggaagagactgcccaaaaaaattcaggacataaaagagcccaacaatagcaaagtctgcaaaaccttgtcttttgattggaagagctgagcactacaaaaaggtttttctctttttctctctttttttttttaaatttcaaaggtgtacttgtgtctcaaagaagagtttataacagctaataaaattttctcacgacacagcacggaaataaccctttctgggaagaggtaagggaaaatttgaaaagaaagacagagtaaaagataacttaaaggcagacatgaggtttctacctcttgtttttaccctgtatttcagccaggccatgaccttagagggaagatggcagcaatcccagagaagttctacaaaacagagagatgggacttcttttcccatggtagagcccacaaagactgaagagcccttcatgagctccctgccccctcatcctaaccaggccgcagagtggcaaagtggaagacctaggtaaaaagataaaggcagagagcctgattatggtctcacacagtcctataggccaaacagtaaatattttagcctctgttgctacttgactctgccactgtaatgaggaggcagtcatagacaacatgcaaacacatgggccaggttgtgctctggtaacactttatttgtggactcagaaatttgaatttcatgtaatttttgcgtgtcatataatttttgtgagattagttttcaacaaatgtaaaattaaaaacatattcttaggtcgcaggccagacaaaaactatggccagaaggccacaggcttgcaaccagtatggcacacatgaggatggtggaaaagaacttctgtaagcttctaaggaatacccaaggatgggtgaagaaatggatgagagagtaggtgaactagaagatgactttcaggaatgacaagaggatacttttaaaggatacactgttaaactgtacaagcagtaaaccatgaaagtgtggacatcagtggtagtaccgaggtgacacagcaaagatgtggaagcttggtagggtgagaaaagagcactggcaagtaccacatgtccctccccagaggccaggctggcacacgacaactacacacccacattccacacatcccggatctcagatcatccctggagagaaggtaagactcatataacaccagaagagactgacttgctttaatatggcaaatttaaaggttttttggctatcaaaagaaataaggatgtacgaattgaactagtatcatttatgaagaaataagttatgtttcaataccttagttatatggccccttaatattcctgactgcctgaggtatgtttgtagtgtccttctacttttgagaaaaataaaattcacacctgaaagcacacagccaaataattgtcccctcgatttgaagtggccccaccaacacatcaaacacttgggtctatgtatctgatttgtctgttggtctacatatttcttcctggtttacaatcatactgtgtaaattgctataactttagaagaacctaaataactggcaacaaagtctcatttaactatgctgcttttagaaaatttaatcaactttctgtatcattctttcaaatgagcaacagattttgctacaagggaaaaaatgaattcctctgggattttgattaaaattcatttaaaactacaaattatttgggaaagacttcgcatcttcagaatactaaactttaccatttagaaatatgattttctatatcagagttaagtattctatgtctccattaaggtttccattatctttattttaaaaatacacatttcctttaggattgtgtaggggagttgtttaattgctaatgaaaatttaatacattttattatatattccgagtatatattactgttctatataaagatcttcatttgtgtgcatttattgtgtatataatcctttttactaaaagctcttagttcttctaatagatttccaggtgattctctaagttcctcagatggatacactatcctcaaacaataatttttttgtaattgtactaagagacacaaaaattcatagttcacatgtaccctgaaacttaaaatataataataataataataaaagttcacagttcactgaaaagaatgcagattgatccttaaagatgtggggaataaaaactcaccttggctcatgaataatgagctcctatagcatgctaccatctactcttcacccatcagataggcaaaaatccaaaggctctgcaatgcacactgttgaggaaactctgaaaaaagagcctcttcccaatggtgacaataagattgcaaagtgattcaccttctctgagaggaagttggcaatatctatcaagaatccatacaaatttatcctttaacccagaacttccacttcatggaatctttctcagatatactgcaaaaactatgaaaaggaaatgccaaacacaggtacaagaatattcattgctttcgtacttagatttttttttcaaatgatctagcaatttattaaatattttacatattatatcgagtatcacaaatcccaaagaatcatgtttctattagaggtaataaagcatataaactttaagtgattaatgtctacaatttttatattgacaagaactctgtattccattacttcaccaaaaactttttgcagtctcttttcagagtatttttaaaatattttacaaatttcaatatgtatatgcttttaaaaaatgcacttaagtgcattctattttcaaaatagcatcttttattcaataatatattttaaactttcatatggcagagacaattcccataaatttgctttatatcatacaccacactactgtagaatgctccttggtaacaacaaaatgttgcattttgaagctttattgcatagaaagaccaattttgtgttgaatctctgaatagaccaaaaacaggagctgaaattgtggcaataaccaatagcttaccaaccaaaaagagtccaggaccagatggattcacagcagaattctaccagaggtacaaggaggaactggtaccattccttctgaaactattccaatcagtagaaaaagagggaatcctccctaactcattttatgaggccagcatcatcctgctaccaaagccaggcagagacaaaaccaaaaaagagaattttagaccaatatccttgatgaacattgatgcaaaaatcctcaataaaatactggcaaaccgaattcagcagcacatcaaaaagcttatccaccatgatcaagtgggcttcgtccctgggatgcaaggctggttcaatatacgcaaatcaataaatgcaatccagcatataaacagaaccaaagacaaaaaccacatgattatctcaatagatgcagaaaaggcctttgacaaaattcaacaacccttcatgctaaaaactctcaataaattaggtattgatgggaagtatctcaaaataataagagctttctatgacaaacccacagccaatatcatactgaatgggcaaaaactggaagcattccctttgaaaactggcacaagacagggatgccctctctcaccactcctattcaacatagtgttggaagttctggacagggcaattaggcaggagaaggaaataaagggtattcaattaggaaaagaggaagtcaaattgtccctgtttgcagatgacatgattgtatatctagaaaaccccattgtctcagcccaaaatctccttaagctgataagcaacttcagcaaagtctcaggatacaaaatcaatgtacaaaaatcacaagcattcttacacaccaataacagacaaacagagagccaaatcatgagtgaactcccattcacaattgcttcaaagagaataaaatacctaggaatccaaattacaagggacgtgaaggacctcttcaaggagaactacaaaccactgctcaaggaaataaaagaggatacaaacaaatggaagaacattccatgctcatgggtaggaagaatcaatattgtgaaaatagccatactgcccaagataatttacagattaaatgccatccccatcaagctactaatgactttcttcacagaattggaaaaaactactttaaagttcatatggaaccaaaaaagagcccgcatcgccaagtcaatcctaagccaaaagaacaaagctggaggcatcacgctacctgacttcaaactatactacaagcctacagtaaccaaaacagcatggtactggcaccaaaacagagctatagagcaatggaacagaacagagccctcagaaataacgacacatatctacaactatctgacctttgacaaacctgagaaaaacaagcaatggggaaaggattccctatttaataaatggtgctgggaaaactggctagccatatgtagaaagctgaaactggatcccttccttacaccttatacaaaaatcagttcaaaatggattaaagacttaaacgttagacctaaaaccataaaaacccaagaagaaaacctaggcattaccattcaggacataggcatgggcaaggacttcatgtctaaaacacaaaaagcaatggcaacaaaagccaaaattgacaaaggggatctaattaaactaaagagcttctgcacagcaaaagaaactagcagcagtgtgaacaggcaacctacaaaatgggagaaaatttttgcaacctactcatctgacaaagggctaatatccagaatctacaatgaactcaaacaaattcacaagaaaaaaacaaacaaccccatcaaaaagtgggcaaaggatatgaacagacacttctcaaaagaagacatttatgcagccaaaaaacacatgaaaaactgttcaccatcactggccatcagagaaatgcaaatcaaaaccacaatgagataccatctcacaccacttagaatggcaatcattaaaaagtcaggaaacaacaggtgctggagaggatgtgcagaaataggaccacttttacactgttggtgggactgtaaactagttcaacccttgtggaagtcagtgtggcgattcctcagggatctagaactagaaataccatttgacccagccatcccattactgggtatatacccaaaggactataaatcatgctgctataaagacacatgcacacgtatgtttattgcggcattattcacaatagcaaagacttggaaccaagccaaatgtctaacaatgatagactggattcagaaaatgtgacacatatacaccacggaatactatgcagccataaaaaatgatgagttcatgtcctttgtagggacatggatgaattggaaatcatcattctctgtaaactatcgcaagaacaaaaaaaccaaacacctcatattctcactcataggtgggaattgaacaatgagaacacatggaaacaggaaggggaacatgacactctggggactgttgtggggtggggggaggggggagggatagcattgggagatatacctaatggtagatgacgagttagtgggtgcagcgcaccagcatggcacacgtatacatatgtaacttagatttttttttttttagacaaggccttgctctgtcactcaggctggactgcagtggcacaaacacagcttactacagcctcaacctaccaggctcaagtgatcctccaatctcagcctcccaagtagccgggaccacaggtgcacaccaaaatgcctggctaatttttaaactttttgtagagatggggtctcaccatgttgcccaggctggtctcaaactcctgggctcaagaaatactcctgccttggcttcccaaagtgctagaattacaagagtgagccactatgctcaggcttataattttttaaaattattatttatcaagtagttcaacaatttctgttcttccttaatcacaaaagcattcagaaaaataaattgttctctaagagtagatttagcgaggctccatatattctaacctcttgttttattgttattttgttcaaagactttaat
